(19) United States
(12) Patent Application Publication
(10) Pub. No.: US 2023/0295268 A1
(43) Pub. Date: Sep. 21, 2023

(54) COMPOSITIONS AND METHODS TO MANUFACTURE TUMOR SUPPRESSOR FUSIONS

(71) Applicant: TheraPten BioSciences, Inc., Kelowna (CA)

(72) Inventor: Athanasios Alevizopoulos, Yverdon-les-Bains (CH)

(73) Assignee: TheraPten BioSciences, Inc., Kelowna (CA)

(21) Appl. No.: 17/953,117

(22) Filed: Sep. 26, 2022

Related U.S. Application Data
(60) Provisional application No. 63/248,956, filed on Sep. 27, 2021.

(51) Int. Cl. C07K 14/765; C12N 9/16; C07K 16/28; C12N 15/86; A61P 35/00

(52) U.S. Cl. CPC C07K 14/765; C12N 9/16; C07K 16/2896; C12N 15/86; A61P 35/00; C12N 2710/16043

(57) ABSTRACT

Provided herein is a fusion protein comprising, or alternatively consisting essentially of, or yet further consisting of an optional signal peptide, a serum albumin, an optional linker, a Phosphatase and Tensin Homolog (PTEN), and an optional purification or detectable marker in any order. Relating polynucleotides, vectors, host cells, pharmaceutical compositions and kits are also disclosed. Further provided are methods for delivering a fusion protein to a subject, treating a cancer or tumor, and/or producing the fusion protein.

### CROSS-REFERENCE TO RELATED APPLICATION

[0001] This application claims priority under 35 U.S.C. § 119(e) to U.S. Provisional Application No. 63/248,956, filed Sep. 27, 2021, the contents of which are hereby incorporated by reference into the present disclosure.

### SEQUENCE LISTING

[0002] The instant application contains a Sequence Listing which has been submitted electronically in XML file format and is hereby incorporated by reference in its entirety. Said XML copy, created on May 22, 2023, is named 117646-0151_SL.xml and is 912,786 bytes in size.

### TECHNICAL FIELD

[0003] This disclosure relates to novel tumor suppressor fusion proteins and methods to manufacture these proteins.

### BACKGROUND

[0004] The Phosphatase and Tensin homolog (PTEN) tumor suppressor was identified in 1997. PTEN is a protein phosphatase with a key mission to down-regulate the activity of the pi3K/AKT kinase pathway, which is very frequently over-activated in cancer. As such, PTEN is inactivated at the level of primary cancer, metastasis, cancer stem cells, and/or circulating tumor cells, across literally all solid cancers, lymphoma and leukemia and in about 25% of all cancer cases. Cancer patients may have complete loss of the PTEN protein (“PTEN null”) or mutated cancer-promoting PTEN proteins that form homo- or hetero-dimers with any normal PTEN left in the cell. PTEN defects can be corrected by bypassing the cell membrane via transfection or viral infection of the PTEN gene or liposomal encapsulation of the protein. Release of active PTEN in the interior of the cells leads to strong anti-cancer responses (e.g., growth inhibition or death) of cells and xenografted tumors, concomitantly with down-regulation of pi3K pathway pharmacodynamic (PD) biomarkers (e.g., AKT, pPRAS40, pS6K). However, neither approach has had any therapeutic or commercial applicability, as evidenced by the lack of such patents and clinical trials. Thus, there exists a need to manufacture PTEN in soluble form and in high quantities to treat cancer and other diseases. This disclosure satisfies this need and provides related advantages as well.

### SUMMARY OF THE DISCLOSURE

[0005] Disclosed are compositions comprising, or alternatively consisting essentially of, or yet further consisting of consecutive amino acids of a PTEN (which is also referred to herein as a PTEN tumor suppressor, for example a PTEN-L and/or a human PTEN) in fusion with consecutive amino acids of a serum albumin (for example a human serum albumin). Also disclosed are compositions comprising, or alternatively consisting essentially of, or yet further consisting of consecutive amino acids of the PTEN tumor suppressor in fusion with consecutive amino acids of human serum albumin. Also disclosed are methods to manufacture the compositions.

[0006] Thus, in one aspect, this disclosure provides a fusion protein comprising, or alternatively consisting essentially of, or yet further consisting of consecutive amino acid sequences of human serum albumin (HSA) and the human PTEN-L or PTEN tumor suppressor. In one aspect, the amino acid sequence of the serum albumin is conjugated directly or indirectly to the N-terminal of the PTEN. In another aspect, the amino acid sequence of the serum albumin is conjugated directly or indirectly to the C-terminal of the PTEN.

[0007] In one aspect, the PTEN is selected from the group of: human PTEN, simian PTEN, rat PTEN, or murine PTEN or a fragment, analogue, variant, mutant, isoform or equivalent of each. In one embodiment, the PTEN is a human PTEN or a fragment, analogue, variant, mutant, or equivalent thereof. In another embodiment, the PTEN is a murine (i.e., mouse) PTEN or a fragment, analogue, variant, mutant, or equivalent thereof. Additionally or alternatively, the PTEN is a PTEN-Long (PTEN-L), or a fragment, analogue, variant, mutant, or equivalent thereof. In another embodiment, the PTEN-L is a human PTEN-L comprising, or consisting essentially of, or consisting of an amino acid sequence of SEQ ID NO:3, or an equivalent thereof. Additionally or alternatively, the PTEN-L is a human PTEN-L encoded by an engineered polynucleotide sequence of SEQ ID NO:171, nucleotide (nt) 64-nt 1728 of SEQ ID NO:171, or a sequence at least 90% identical thereto which encodes the same amino acid sequence as encoded by SEQ ID NO:171 or nucleotide (nt) 64-nt 1728 of SEQ ID NO:171. In another embodiment, the PTEN is a PTEN-M isoform, or a fragment, analogue, variant, mutant, or equivalent thereof. The PTEN-M is a human PTEN-M having an amino acid sequence of SEQ ID NO:6. Additionally or alternatively, the PTEN-M is a human PTEN-M encoded by an engineered polynucleotide sequence of SEQ ID NO:198, or a sequence at least 90% identical thereto which encodes the same amino acid sequence as SEQ ID NO:6. In yet another embodiment, the PTEN is a PTEN-N isoform, or a fragment, analogue, variant, mutant, or equivalent thereof, optionally wherein the PTEN-N is a human PTEN-N having an amino acid sequence of SEQ ID NO:7, and/or optionally wherein the PTEN-N is a human PTEN-N encoded by an engineered polynucleotide sequence of SEQ ID NO:199, or a sequence at least 90% identical thereto which encodes the same amino acid sequence as SEQ ID NO:7. In a further embodiment, the PTEN is a PTEN-O isoform, or a fragment, analogue, variant, mutant, or equivalent thereof. The PTEN-O is a human PTEN-O having an amino acid sequence of SEQ ID NO:8. Additionally or alternatively, the PTEN-O is a human PTEN-O encoded by an engineered polynucleotide sequence of SEQ ID NO:200, or a sequence at least 90% identical thereto which encodes the same amino acid sequence as SEQ ID NO:8. In a further embodiment, the PTEN is a PTEN-S isoform, or a fragment, analogue, variant, mutant, or equivalent thereof. The PTEN-S is a human PTEN-S having an amino acid sequence of SEQ ID NO:2 or an equivalent thereof. Additionally or alternatively, the PTEN-S is a human PTEN-S encoded by an engineered polynucleotide sequence of SEQ ID NO:172, or a sequence at least 90% identical thereto which encodes the same amino acid sequence as SEQ ID NO:2. In yet a further embodiment, the PTEN comprises a minimal PTEN-S, or a fragment, analogue, variant, mutant, or equivalent thereof. The minimal PTEN-S comprises an amino acid sequence of SEQ ID NO:162. Additionally or alternatively, the minimal PTEN-S comprises an amino acid sequence encoded by the engineered polynucleotide sequence selected SEQ ID NO:197, or a sequence at least 90% identical thereto which encodes the same amino acid sequence as SEQ ID NO:162.

[0008] In one aspect, the PTEN comprises amino acids 174 to 576 of SEQ ID NO:1 and one or more of the following: amino acids 22-27 of SEQ ID NO:1; amino acids 44-59 of SEQ ID NO:1; amino acids 43-79 of SEQ ID NO:1; amino acids 80-120 of SEQ ID NO:1; amino acids 121-173 of SEQ ID NO:1; and/or amino acids 151-173 of SEQ ID NO:1. In one embodiment, the PTEN comprises amino acids 121-173 of SEQ ID NO:1. In a further embodiment, the PTEN comprises amino acids 121-173 of SEQ ID NO:1 and PTEN-S. In a further embodiment, the PTEN comprises an amino acid sequence of SEQ ID NO: 25. In another embodiment, the PTEN comprises an amino acid sequence of SEQ ID NO: 50.

[0009] In a further embodiment, the fusion protein comprises, or alternatively consists essentially of, or yet further consists of an amino acid sequence selected from the group of SEQ ID NOs: 28, 19, 18, 129 131, 25 or 50. Ina further aspect the PTEN comprises, or consists essentially of, or yet further consists of the amino acid sequence of PR61 (SEQ ID NO: 19) or an equivalent thereof.

[0010] In one aspect, provided is a fusion protein comprising, or alternatively consisting essentially of, or yet further consisting of an amino acid sequence encoded by an engineered polynucleotide sequence selected from the group of: SEQ ID NOs: 54-70, 74-77, 135-160 or a fragment thereof, or a polynucleotide at least 90% identical thereto and which encodes the same amino acid sequence as SEQ ID NOs: 54-70, 74-77, 135-160, respectively. In one embodiment, the fusion protein comprises, or alternatively consists essentially of, or yet further consists of an amino acid sequence encoded by an engineered polynucleotide sequence selected from the group of: SEQ ID NOs: 68, 59, 58, 157, 159, 65, or 136, or a fragment thereof, or a sequence at least 90% identical thereto which encodes the same amino acid sequence as SEQ ID NOs: 68, 59, 58, 157, 159, 65, or 136, respectively.

[0011] In a further aspect, provided is a fusion protein comprising, or alternatively consisting essentially of, or yet further consisting of any one of the amino acid sequence of SEQ ID NOs: 14-17, 20-27, 29-30, 34-37, 49-50, 109-132, or a fragment, analogue, variant or equivalent of each, or a mutant of each. In a further embodiment, the fusion protein further comprises one or more mutations selected a position equivalent to any one or more of the following: S65, S85, S89, S91, S94, S111, S115, S117, S129, S134, T140, S161, S163, S164 and S168 of SEQ ID NO:1 and/or S170, N292, S355, S360, S366 and S370 of SEQ ID NO:2, optionally to an aspartate or a glutamate. Additionally or optionally, the protein is glycosylated. For example, one or more of the serine (S) and/or threonine (T) residues of the protein is O-glycosylated, and/or one or more of asparagine (N) residues of the protein is N-glycosylated. In one embodiment, the fusion protein comprises, or alternatively consists essentially of, or yet further consists of an amino acid sequence selected from the group of SEQ ID NOs: 28, 19, 18, 129, 131, 25 or 50, or a fragment, analogue, variant or equivalent of each thereof.

[0012] Optionally, the fusion protein further comprises one or more mutations selected a position equivalent to any one or more of the following: S65, S85, S89, S91, S94, S111, S115, S117, S129, S134, T140, S161, S163, S164 and S168 of SEQ ID NO:1 and/or S170, N292, S355, S360, S366 and S370 of SEQ ID NO:2 or an equivalent thereof that retains these mutated amino acids. In one embodiment, the amino acid(s) is/are mutated to an aspartate or a glutamate. In certain embodiments, the fusion protein further comprises one or more mutations selected a position equivalent to any one or more of the following: S115, S117, S129, S134, T140, S161, S163, S164 and S168 of SEQ ID NO: 1 or an equivalent thereof that retains these mutated amino acids. In a further embodiment, the fusion protein further comprises one or more mutations selected a position equivalent to any one or more of the following: S115, S117, S163, S164 and S168 of SEQ ID NO: 1 or an equivalent thereof that retains these mutated amino acids.

[0013] Additionally, the serum albumin is selected from the group of: a human serum albumin (HSA), a simian serum albumin (SSA), a rat serum albumin (RSA), or a mouse serum albumin (MSA), or a fragment, analogue, variant, mutant, isoform or equivalent of each. In one embodiment, the serum albumin is an HSA or a fragment, analogue, variant, mutant, isoform or equivalent thereof. In another embodiment, the serum albumin is a MSA or a fragment, analogue, variant, mutant, isoform or equivalent thereof. In one embodiment, the albumin comprises an amino acid sequence of amino acids 35-385 or 63-585 of SEQ ID NO:13 or an equivalent thereof. Optionally, the serum albumin comprises a mutation at a position equivalent to amino acid 58 or SEQ ID NO:12 (also known as amino acid 34 of SEQ ID NO:13) or an equivalent thereof that retains these mutated amino acids. Further optionally the mutation is from Cysteine to Serine. Additionally or alternatively, the serum albumin comprises an amino acid conjugated with a molecule at a position equivalent to amino acid 34 of SEQ ID NO:13 or an equivalent thereof that retains these mutated amino acids. The molecule is selected from the group of: a small molecule, a cytotoxic molecule, a linker, a pH-sensitive linker, and/or a thiol linker. In a further embodiment, the serum albumin comprises an amino acid sequence selected from the group of: SEQ ID NOs:12-13, 90-93 and 163, or a fragment, analogue, variant, mutant, isoform or an equivalent of any one of SEQ ID NOs:12-13, 90-93 and 163 that has the same or similar activity as SEQ ID NOs:12, 13, 90-93, or 163, respectively. In one embodiment, the serum albumin comprises an amino acid sequence of SEQ ID NO: 92, or a fragment, analogue, variant, mutant, isoform or an equivalent of SEQ ID NO: 92 that has the same or similar activity as SEQ ID NO: 92. In another embodiment, the serum albumin comprises an amino acid sequence of SEQ ID NO: 90, or a fragment, analogue, variant, mutant, isoform or an equivalent of SEQ ID NO: 90 that has the same or similar activity as SEQ ID NO: 90. In yet a further embodiment, the serum albumin comprises an amino acid sequence selected of SEQ ID NO:13, or a fragment, analogue, variant, mutant, isoform or an equivalent thereof that has the same or similar activity as SEQ ID NO: 13. One of such fragment comprises an amino acid sequence of SEQ ID NO: 163. Additionally or alternatively, the serum albumin comprises an amino acid sequence encoded by an engineered polynucleotide sequence selected from the group of: SEQ ID NO:176-179, or a sequence at least 90% identical thereto which encodes the same amino acid sequence as encoded by SEQ ID NO:176-179.

[0014] In a further aspect, the fusion protein further comprises a signal peptide. In one embodiment, the signal peptide is at the N-terminal of the fusion protein for secretion and/or is selected from the group of: an HSA signal peptide, an SSA signal peptide, an RSA signal peptide, an MSA signal peptide, a signal peptide of murine α2-macroglobulin, a murine fibrinogen signal peptide, a murine α1-antitrypsin signal peptide, a murine IgGκ chain signal peptide, a human IgG heavy chain signal peptide, a human CD33 signal peptide, or an artificial signal peptide. In a further embodiment, the signal peptide comprises an amino acid sequence selected from the group of SEQ ID NOs:93-105. In yet a further embodiment, the signal peptide comprises an amino acid sequence selected from the group of SEQ ID NOs: 93, 99, 100, 103, or 105. In one embodiment, the signal peptide comprises an amino acid sequence selected from the group of SEQ ID NOs: 93, 99, or 100. In certain embodiments, the signal peptide is encoded by an engineered polynucleotide sequence selected from the group of: SEQ ID NO:180-192, or a sequence at least 90% identical thereto which encodes the same amino acid sequence as SEQ ID NO:93-105, respectively.

[0015] In yet a further embodiment, the fusion protein further comprises one or more of the following: a first linker between the albumin and the PTEN, a second linker at the C-terminal of the signal peptide and a third linker at the N-terminal of the fusion protein. In one embodiment, one or more of the linkers are cleavable, optionally by a protease present in a peri-cancerous cell or tissue, or an intracellular protease. In a further embodiment, one or more of the linkers comprise an amino acid sequence selected from the group of SEQ ID NO:48 or 106-108.

[0016] In one aspect, the HSA comprises, or consists essentially of, or yet further consists of the amino acid sequence of SEQ ID NO:12 or SEQ ID NO:13, or SEQ ID NO:90-92, or SEQ ID NO:163 or an equivalent, a fragment, analogue or variant of each. In a further aspect, the PTEN or PTEN-L comprises, or consists essentially of, or yet further consists of, the amino acid sequence of SEQ ID NO:1, 2, 3, 6, 7, 8, 88 or 89, or SEQ ID NO:134 or SEQ ID NO:162, or an equivalent, a fragment, analogue or variant of each. In another aspect, a fusion protein comprises, or consists essentially of, or yet further consists of an amino acid sequence selected from the group of: SEQ ID NOs:28, 14-17, 18, 19, 20-27, 29-30, 50, 117-132 or a fragment, analogue, variant, mutant, or equivalent of each of SEQ ID NOs:28, 14-17, 18, 19, 20-27, 50, 117-132. Additionally or alternatively, a fusion protein comprises, or consists essentially of, or yet further consists of an amino acid sequence encoded by an engineered polynucleotide sequence selected from the group of: SEQ ID NOs:68, 54-57, 58, 59, 60-67, 69-70, 136, 145-160 or a fragment thereof, or a sequence at least 90% identical thereto which encodes the same amino acid sequence as encoded by SEQ ID NOs:68, 54-57, 58, or 59, 60-67, 69-70, 136, 145-160 respectively.

[0017] In one aspect, any one or more of the above polypeptides or fusion protein further comprises a detectable marker or purification marker.

[0018] Further provided are fusion proteins that comprise, or consist essentially of, or yet further consist of the amino acid sequence of SEQ ID NO:18, 19, or an equivalent or a fragment, analogue or variant of each thereof. In one embodiment, also is provided a fusion protein that comprises, or consists essentially of, or yet further consists of the amino acid sequence of SEQ ID NO:24, or an equivalent or a fragment, analogue or variant of each thereof. In another aspect, a fusion protein is provided that comprises, or consists essentially of, or yet further consists of the amino acid sequence of SEQ ID NO:25, or an equivalent or a fragment, analogue or variant thereof. Also further provided are SEQ ID NO:126, 128, or 164-171 or an equivalent of each thereof. Yet further provided are fusion proteins that comprise, or consist essentially of, or yet further consists of any one of the amino acid sequences of SEQ ID NOs:26-28, 38, 50, 126-132, or 164-171, or a fragment, analogue or variant of each. In one aspect, the fusion protein further comprises a detectable or purification marker.

[0019] In a further aspect, the fusion protein comprises, or consists essentially of, or yet further consists of a PTEN polypeptide of amino acid SEQ ID NOs.: 2 or 3 or an equivalent thereof. The PTEN polypeptide can be combined with a serum albumin element as described herein. In one aspect the serum albumin comprises, or consists essentially of, or yet further consists of an amino acid of SEQ ID NO:164 or 92 or an equivalent thereof. In a further aspect one, the PTEN and/or serum albumin element comprises, or consists essentially of, or yet further consist of a signal peptide element as described herein, examples of such include SEQ ID NOs:93, 99 or 100, or an equivalent thereof. In a yet further aspect, the PTEN and/or serum albumin element (that optionally comprises a signal peptide) comprises, or consists essentially of, or yet further consists of a linker peptide of amino acid of SEQ ID NOs:48, 106-108, 164, or 165 or an equivalent thereof. In one aspect, the fusion protein comprises, or consists essentially of, or yet further consists of is PR61 (SEQ ID NO:61). Further provided are the polynucleotide encoding these elements alone or in combination with each other. The polypeptide, fusion protein and/or polynucleotides can further comprise a detectable or purification marker.

[0020] Further provided are isolated and/or engineered polynucleotides encoding a fusion protein of this disclosure, as well as vectors and host cell systems comprising the polynucleotides. In one aspect, the isolated and/or engineered polynucleotides, vectors or host cells further comprises a detectable or purification marker. In one embodiment, the polynucleotide comprises, or alternatively consists essentially of, or yet further consists of an engineered polynucleotide sequence selected from the group of: SEQ ID NOs: 54-70, 74-77, 135-160 or a fragment thereof. In a further embodiment, the polynucleotide comprises, or alternatively consists essentially of, or yet further consists of a polynucleotide at least 90% identical to any one of SEQ ID NOs: 54-70, 74-77, 135-160 and encoding the same amino acid sequence as SEQ ID NOs: 54-70, 74-77, 135-160, respectively. In one embodiment, the polynucleotide comprises, or alternatively consists essentially of, or yet further consists of an engineered polynucleotide sequence selected from the group of: SEQ ID NOs: 68, 59, 58, 157, 159, 65, or 136, or a fragment thereof. In a further embodiment, the polynucleotide comprises, or alternatively consists essentially of, or yet further consists of a polynucleotide at least 90% identical to any one of SEQ ID NOs: 68, 59, 58, 157, 159, 65, or 136 and encoding the same amino acid sequence as SEQ ID NOs: 68, 59, 58, 157, 159, 65, or 136, respectively. In certain embodiments, the engineered polynucleotide sequence comprises, or alternatively consists essentially of, or yet further consists of one or more engineered polynucleotides selected from any polynucleotides as summarized in Table 1 and listed herein, or a polynucleotide at least 90% identical to each and encoding the same amino acid.

[0021] In one aspect, the host cell is a prokaryotic cell or a eukaryotic cell, e.g., a Chinese Hamster Ovary (CHO) cell. In one aspect, the cell comprises, or consists essentially of, or yet further consists of a polynucleotide and/or a vector as disclosed.

[0022] The polynucleotides, vectors and host cells are useful for the recombinant production of the fusion proteins. In one aspect, the polynucleotides are sequence-optimized (e.g. SEQ ID NO:41-47, 54-78, 86, 135-161, 166-167, 171-172, 176-200, and 204-206). Further provided are the methods for producing the recombinant polypeptides produced by expressing the polynucleotides in a host cell and growing the cell under conditions that favor the expression of the polynucleotides. In a further aspect, the recombinant fusion protein is isolated from the cell or culture media. The cells can be prokaryotic or eukaryotic (such as a Chinese Hamster Ovary cell (CHO), and the fusions produced by each cell differ in post-translational modification. The proteins, polypeptides and fusions produced by these methods are also provided.

[0023] In one aspect, the fusion protein (for example, the albumin-PTEN fusion protein) is produced by a process comprising the step of culturing a host cell capable of expressing a polynucleotide encoding the fusion protein (e.g., albumin-PTEN fusion protein) under conditions suitable for expression of the fusion protein coding polynucleotide (e.g., albumin-PTEN polynucleotide) and optionally further comprising isolating the fusion protein produced by the cell from the cell culture or culture medium. The cell can be prokaryotic or a eukaryotic, such as a Chinese hamster ovary (CHO) cell. The proteins, polypeptides and fusions produced by these methods are also provided. Additionally provided is a method of producing a fusion protein as disclosed herein. The method comprises culturing a host cell capable of expressing the fusion protein under conditions suitable for expression of the fusion protein and purifying or isolating the fusion protein optionally from the cell or cell culture medium. This method achieves a high yield, and/or a high stability compared to a wildtype PTEN-L protein produced via the same host cell and under the same condition.

[0024] Also provided are compositions comprising one or more of the fusion protein(s), polynucleotide(s), vector(s), and/or host cell(s) and a carrier, e.g., a pharmaceutically acceptable carrier. In one embodiment, the vector is a viral vector (for example, an AAV, a HSV, or an adenoviral vector (AdV)) expressing a fusion protein in a host cell and/or in a subject. In one aspect, provided herein are pharmaceutical compositions comprising, or consisting essentially of, or yet further consisting of, the fusion protein, for example, the albumin-PTEN fusion protein as disclosed herein, and at least one pharmaceutically acceptable carrier and optionally a stabilizer or preservative. The compositions optionally comprise an additional therapeutic agent, e.g., a chemotherapeutic agent and/or a combined therapy as disclosed herein.

[0025] Thus, further provided are methods for inhibiting the growth of a cancer cell by contacting the cell with an effective amount of one or more of a fusion protein as disclosed herein, a polynucleotide encoding the fusion protein, and/or a vector comprising the polynucleotide. The contacting can be in vitro or in vivo. When practiced in vitro, the methods are useful to test for the effectiveness of the fusion polypeptide against a cancer, alone or in combination with other therapies. When practiced in vitro in an animal, the method provides a convenient animal model to test for effectiveness, alone or in combination with other therapies. In one aspect, the cancer refers to a solid tumor and/or a non-solid (for example, blood) cancer. Additionally or alternatively, the cancer lacks PTEN expression. For example, the cancer has an H score of PTEN staining of about 20 or lower. Method of calculating an H score is available to one of skill in the art, e.g., as disclosed herein. In another aspect, the cancer comprises an increased pi3K pathway pharmacodynamics biomarkers (for example, AKT, pPRAS40, pS6K, pGSK3, pFOXO, or any combination thereof) compared to a control. Such control may be a biological sample from a subject who is free of any cancer or tumor, or a biological sample of another cancer. In a further embodiment, the method comprises contacting the cell with an effective amount of a combinated therapy as disclosed herein.

[0026] Also provided are methods to treat cancer in a subject, comprising administering to the subject an effective amount of one or more of a fusion protein/polypeptide, a polynucleotide encoding the fusion protein/polypeptide, and/or a vector comprising the polynucleotide, thereby treating the cancer. In one aspect, the cancer refers to a solid tumor and/or a non-solid (for example, blood) cancer. Additionally or alternatively, the cancer lacks PTEN expression. For example, the cancer has an H score of PTEN staining of about 20 or lower. Method of calculating an H score is available to one of skill in the art, e.g., as disclosed herein. In another aspect, the cancer comprises an increased pi3K pathway pharmacodynamics biomarkers (for example, AKT, pPRAS40, pS6K, pGSK3, pFOXO, or any combination thereof) compared to a control. Such control may be a biological sample from a subject who is free of any cancer or tumor, or a biological sample of another cancer. In a further embodiment, the method comprises administering to the subject an effective amount of a combinated therapy as disclosed herein.

[0027] Further provided are methods to deliver a fusion protein/polypeptide, a polynucleotide, a vector, and/or a composition comprising such to a subject by administering an effective amount of one or more of the fusion protein/polypeptide, polynucleotide, and/or vector, thereby delivering the polypeptide, polynucleotide, vector or composition to the subject. Optionally, the fusion protein is delivered to the extracellular matrix (ECM) of a cancer in the subject.

[0028] Further provided are kits comprising, or alternatively consisting essentially of, or yet further consisting of one or more of the fusion proteins/polypeptides, polynucleotides encoding them, vectors, or host cells, and optionally a combined therapy and/or instructions for use.

### BRIEF DESCRIPTION OF THE DRAWINGS

[0029] FIG. 1 provide a representative gel result showing that location of the 6xHis tag (SEQ ID NO: 243) has an unpredictable impact on PTEN-L expression and solubility but manufacturability remains unacceptable in all cases. Cytoplasm- or periplasm and N′ or C′-prime 6xHis-tagged PTEN-L variant proteins (“6xHis-tag” disclosed as SEQ ID NO: 243) (63 KDa; arrow) were expressed in BL21 E. coli under the control of the T5 promoter, as shown. Cells were induced by standard procedures or left uninduced and then lysed in 1×TBS pH 7.4. Total (TOT) and Soluble (SOL) fractions were prepared and run on SDS-PAGE; the gel was stained with Coomasie.

[0030] FIG. 2 shows that Corynebacterium glutamicum cannot secrete human PTEN-L but instead the protein remains trapped in intracellular inclusion bodies in the cytoplasm.

[0031] FIG. 3 shows that Lactobacillus plantarum can secrete exogenous enzymes like manB but not human PTEN-L.

[0032] FIG. 4 shows that Pichia pastoris cannot make PTEN-L or a human serum albumin-PTEN-M fusion.

[0033] FIGS. 5A-5B provides results obtained relating to N-terminal thioredoxin-PTEN-M fusion protein. (FIG. 5A) The Sf9 insect/baculovirus system can secrete a N-terminal thioredoxin-PTEN-M fusion (WB, lane 1, upper boxed 82 KDa band; arrow level) and a truncated PTEN-M (WB, lane 1, lower boxed 65 KDa band), while most of the exogenous protein remains intracellular (WB, lanes 3-4). Shown is a WB targeting a C-terminal 6xHis tag (SEQ ID NO: 243) on the protein. However, the 65 KDa band lacks the minimal cell-penetration domain containing the 6Arg (MCPD; SEQ ID NO:39), as determined by LC/MS protein sequencing of the 65 KDa band (FIG. 5B), demonstrating this system altogether has little, if any value for PTEN industrial manufacturing. Figure discloses SEQ ID NO: 87.

[0034] FIGS. 6A to 6D show representative illustrations of fusion proteins and a product plasmid. (FIG. 6A) Cartoons of key mammalian PTEN-albumin fusions disclosed herein. PR402 has the orientation N′-PTEN-L-human serum albumin-C′, whereas PR61 has the opposite orientation: N′-human serum albumin-PTEN-S-C′. The inverse versions of both PR402 (e.g. PR3) and PR61 (e.g. PR65) cannot be secreted by CHO-3E7 cells to meaningful amounts. PR407 is PR402 with a Cathepsin B-cleavable linker added in frame between the two domains that can be cleaved by this cancer-associated protease only at the peri-cancerous area. SP: Signal Peptide of human serum albumin (SEQ ID NO:93) that is cleaved upon protein secretion. See examples and Table 1 for further details. (FIG. 6B) Schematic representation of PR402-like and PR61-like fusions, and of binding sites and characteristics of key commercially available anti-PTEN and anti-albumin monoclonal antibodies (mAbs). Some of these mAbs are available as HRP-conjugates by the vendor (denoted by stars). Question marks mean the binding site is unknown or presumed. The species selectivity of the mAbs is shown under each box, as follows: M: mouse; R: rat; S: monkey; H: human. (FIG. 6C) Cartoon of the pTT5 mammalian expression vector used to express the various PRs (see Table 1) in this study. The salient features of the vector (e.g. the CMV promoter, polyadenylation signals, the origin of replication etc.) are indicated. Further details can be found at Durocher & Loignon, (2009); and U.S. Pat. No. 8,637,315. Optimized PR cDNAs were cloned as unique EcoRI-HindIII fragments in the vector polylinker. The fragment/vector identity was confirmed with restriction analysis and DNA sequences in all cases. (FIG. 6D) construction of a recombinant oncolytic HSV-1 vector expressing albumin-PTEN fusions (upper panel) and the genomic coordinates on the HSV genome (lower panel). In the upper panel, the HSV-1 genome is represented as a solid line, whereas the genes of interest are boxed. The cartoon is not drawn to scale. In the lower panel, each primer maps to, for example, the ICP47 upstream flanking region forward primer 47upF (SEQ ID NO:212) binds thymidine 143,675 to cytosine 143,699 of the HSV-1 genome, whereas the rest of the primers' sequence is used for cloning. Numbering refers to NCBI Reference Sequence: NC_001806.2.

[0035] FIG. 7 shows expression and stability of various mutants secreted in the supernatants CHO-3E7 cells. Note the F-1 pan-PTEN antibody (Ab) (see FIG. 6B for its binding site) also binds a 300 KDa protein in the supernatants non-specifically (lane 13).

[0036] FIGS. 8A to 8B provide comparison of HEK293 grown under three different conditions and CHO-3E7 cells with respect to expression and stability of secreted PR1-4 (FIG. 8A) and PR5-8 (FIG. 8B).

[0037] FIG. 9 shows that fusion of PTEN-L at the C′ of thioredoxin does not lead to any appreciable secretion of the resulting (PR430) fusion by CHO-3E7 via the non-canonical (leaderless) pathway known to mediate Trx1 secretion in other mammalian cells. Stars denote the successful secretion of PR402 and PR61 under the same conditions.

[0038] FIG. 10 shows that PR401, PR403 and PR404 are all cleaved by a furin-like protease, whereas while still containing the putative furin-like sequence, PR402 is largely protected.

[0039] FIGS. 11A to 11D show that the Minimal Cell Penetration Domain (6xArg) of PTEN-L is the target of furin-like mediated cleavage. (FIG. 11A) The degradation proneness of PR3 and PR5 cannot be reversed by treatment of cultures with non-specific protease inhibitors like ferric citrate (F; Lonza BE02-043E; diluted to 10× final concentration and given at 1 dpt) or Sigma™ protease inhibitor cocktail (PI; #P1860; given diluted 800× on 1 dpt and 1,600× at 3 dpt); in contrast, PR6 is stable regardless of protease inhibition. U: untreated; M: mock; D lanes: positive control extracts from previous preparations (lane 6D shows some “gel smiling” that was not reproducible). (FIG. 11B) PR3 cleavage is sensitive to a cell-permeable furin peptide inhibitor but the effect is attenuated as the culture continues (F; Merck-Millipore #344930; 50 μM final concentration in 0.5% DMSO). D: DMSO (0.5%); U: untreated. Cell viability was >93.7% at 2 dpt in all cases; at 6 dpt % viabilities were: (73, 79, 88); (83, 91, 90); and (84, 83, 87) for lanes (4-6); (10-12); and (16-18), respectively. (FIG. 11C) A furin-like protease cleaves PR1 within the consensus sequence. Figure discloses SEQ ID NO: 14. (FIG. 11D) Unlike PR3, PR34 lacks the Minimal Cell Penetration Domain of PTEN-M and is therefore protected from cleavage by a furin-like protease.

[0040] FIGS. 12A to 12D provide evaluation on secretion of various fusion proteins. (FIG. 12A) Optimization of Signal Peptide (SP) Sequences on PR402. Mature PTEN-L HSA fusion was expressed & secreted under the control of the Human Serum Albumin Signal Peptide (PR402; control), or the Signal Peptide of murine α2-macroglobulin (PR419), murine fibrinogen (PR420), murine α1-antitrypsin (PR421), murine IgGκ chain (PR422), human IgG heavy chain (PR424), human CD33 (PR425), and two artificial SPs from Güler-Gane et al, (2016) PMID: 27195765 (PR426 & PR427). Expression and secretion of the PR428, the murine equivalent of PR402 is shown as well. (FIG. 12B) Unlike a PR402 PTEN-L HSA fusion variant (PR415), a PTEN-M HSA fusion (PR416) cannot be secreted by CHO-3E7 cells. PR415 and PR416 contain a Cys34Ser point mutation of the so-called scavenger Cys34 of HSA. The mutation has no effect on PR415, which is expressed and secreted as well as the control PR402 fusion. (FIG. 12C) Addition of the acidic hemagglutinin (HA) tag upstream of PR402 paradoxically appears to increase secretion in the CHO-3E7 supernatant (PR409). Domain I (aa 1-198) of HSA is insufficient for stabilization and secretion of a PTEN-L-HSA fusion (PR414), whereas at least domains I and II (aa 1-385; PR413), but most preferably the entire HSA (aa 1-585) is required for this purpose. (FIG. 12D) The first 62 aa of HSA are dispensable for PR402 secretion in the CHO cell supernatant, as both PR417 and PR418, which lack the first 34 and 62 aa of mature HSA are expressed to similar levels as the control PR402.

[0041] FIG. 13 shows that even though PR65 has a similar domain structure to PR402 (PTEN-S-HSA and PTEN-L-HSA), PR65 is surprisingly hardly detectably secreted in the CHO cell supernatants, unlike the inverse mutant PR61 and its mouse (PR68) & rat (PR66) homologues. Remarkably, domain III of RSA (PR67) is apparently redundant for PTEN-S stabilization, as opposed to PTEN-L stabilization (FIG. 12C). Varying amounts of BSA (purified recombinant Bovine Serum Albumin) were included in the gel so as to provide an estimate of the yield of PR61-like proteins in the CHO-3E7 cell supernatants.

[0042] FIG. 14 shows that in-frame addition of a MMP2/9-cleavable linker between the PTEN-L and albumin domains of PR402 results in a fusion protein (PR405) that, like PR402, is protected from cleavage by furin. In contrast, PR401 which contains a furin-cleavable linker at an equivalent position is degraded completely.

[0043] FIG. 15 provides result relating to in vitro digestion of PR402, PR405, PR406, PR407 and PR408 and demonstrates sequence and pH-specific fusion cleavage by recombinant MMP2 (PR405 only) and CATSB (PR407, PR408 only) to release PTEN-L-like, −70 KDa fragments (stars).

[0044] FIGS. 16A to 16B provide evaluation on PR402 production. (FIG. 16A) Manufacturing and purification scouting of PR402 by imidazole affinity chromatography (4-12% SDS-PAGE gel stained with Coomasie). Starting (SN; lane 1), flow through (FT; lane 2), wash (3-4) and purified, desalted protein (lane 5) are indicated. Lane 6 corresponds to purified PR402 that was not reduced prior to SDS-PAGE. (FIG. 16B) WB of the indicated lanes from (FIG. 16A) using the F-1 pan-PTEN antibody showing the semi-pure PR402 at 130 KDa.

[0045] FIGS. 17A to 17C provide evaluation on PR405 production. Manufacturing and purification scouting of PR405 (denoted by stars) by Cibacron Blue albumin affinity chromatography (FIG. 17A), followed by heparin affinity chromatography to remove albumin degradants (denoted by crosses) (FIG. 17B), leading to substantially pure PR405 (FIG. 17C) ST: Starting Material of the column; FT: Flow Through of the column; bD: pooled sample before dialysis; DP: dialysis precipitate solubilized in Laemmli buffer showing that PR405 remained soluble during dialysis; W: column wash; P: positive control 6xHis-tagged protein (SEQ ID NO: 243). Shown are SDS-PAGE gels for FIGS. 17A & B and WB (anti-6xHis (SEQ ID NO: 243)) for FIGS. 17A-C.

[0046] FIG. 18 shows purification scouting of an aged batch of PR402 on Hydrophobic Interaction Chromatography. PR402 binds the column in the presence of high salt and can be eluted therefrom by reduction of salt concentration. P: positive control 6xHis-tagged protein (SEQ ID NO: 243).

[0047] FIGS. 19A to 19C provide analysis relating to post-translational modification (FIG. 19A) PR402 has exactly the expected sequence, as determined by LC/MS of IMAC-purified (FIGS. 16A to 16B), gel-excised monomeric protein. Coverage was 99.6%. Figure discloses SEQ ID NO: 28. (FIG. 19B) The LUD is heavily O-glycosylated with mucin-like structures, as determined by LC/MS of IMAC-purified, gel excised monomeric PR402 and F137 fusions (domain structure: LUD-PTEN-S-HSA and LUD-p53-HSA, respectively). Note that, in contrast to PR402 LC/MS, HSA Signal peptide (SEQ ID NO:93) could be detected in the F137 LC/MS spectra, suggesting that the F137 fusion is not cleaved properly; perhaps that could be a reason why the F137 O-glycan coating is quite heterogeneous. The lower panel shows a graphical alignment of experimentally determined O-glycans for PR402 (upper lines) and F137 (lower lines), indicating high concordance of O-glycan target residues. Boxed amino acids represent O-glycan coated residues. Residues in bold correspond to mutations of the human sequence found in the mouse (S85C and S129G); indicating that S85 and S129 O-sugar antennas may serve additional functions in humans that are not found in rodents; S116G is the sole PTEN-L mutation found in monkeys, which may also result in a slightly different O-sugar profile between simians and humans within the highly glycosylated S128-130 cluster. Figure discloses SEQ ID NOS 5 and 5, respectively, in order of appearance. (FIG. 19C) N- and O-glycan linked residues of the PTEN-S moiety of PR402 as determined by LC/MS. Tn: Tn antigen (GalNAc); Tf: T antigen (GalNAc-3G); sT: sialyl-T antigen (GalNAc-3 SG); 2sT: di-sialyl-T antigen (GalNAc-6S-3 SG).

[0048] FIGS. 20A to 2011 show the PTEN-albumin fusions disclosed herein are functional cell penetrating tumor suppressors. (FIG. 20A) (Upper panel) Exogenous PTEN-M (˜70 KDa; stars) contained in a PR5 CHO-3E7 cell supernatant that was placed into contact with either PTEN null (KTOSA) or PTEN-S-null (REM134) cancer cells for 4 h, enters cells and down-regulates the phosphorylation of pS6K. Shown is a WB of total KTOSA and REM134 cell extracts using the pan-PTEN mAb 138G6, a phospho-specific antibody of pS6K (T389) (Cell Signaling catalog #9202), or a (3-actin antibody as loading control (Cell Signaling catalog #13E5). (Lower Panel) The same PR5 CHO-3E7 cell supernatant used above was blotted with anti-PTEN and anti-HSA antibodies to visualize PTEN-M-containing (stars) or HSA-containing fragments (crosses). Based on the Ponceau staining of both blots, which was identical (shown here is only the HSA Ponceau S staining), it can be concluded that the PR5 CHO-3E7 supernatant substantially contains albumin degradants and little if any PTEN-M. The 300 KDa band seen on the F-1 blot could be PR5 aggregates or a host cell protein (as in FIG. 7, legend). Mck: mock. (FIG. 20B) PR402 enters PTEN null PC3 prostate cancer cells. PC3 cells were dosed with the indicated final concentrations of IMAC-purified PR402 (as in FIG. 16) for 4 h or 24 h. In lanes 2-4 & 8-10, the semi-pure PR402 stock solution was diluted with fresh culture medium and then added to PC3 cells, whereas in lanes 6 and 12, the stock solution was diluted with an equal volume of a crude, mock-transfected CHO-3E7 supernatant to see if factors in the latter may affect PR402 cell entry. Cell extracts were blotted with the F-1 anti-PTEN mAb, which recognizes several non-specific bands (including the 300 KDa band reported in FIG. 7) that nevertheless serve as internal controls. PR402 entry is already visible at 10 nM PR402 (lane 3) but becomes prominent at 100 nM, especially at 4 h (lanes 4, 6, 10 and 12 at 130 KDa). (FIG. 20C) Two distinct batches of semi-pure PR402 initiate similar levels of apoptosis of PC3 prostate cancer cells after just 1 h of treatment, as measured by the Caspase 3/7-Glo Luciferase assay. (FIG. 20D) PR402 initiates dose-responsive cell death of PTEN null SK-MEL-28 human melanoma cells, as measured by the Caspase 3/7-Glo Luciferase assay. (FIG. 20E) Dose responsive initiation of cell death of mouse 4T1 triple negative breast and mouse ID-8 ovarian cancer cells by PR402, as measured by the Caspase 3/7-Glo Luciferase assay. The GL261 mouse glioblastoma cells resist apoptosis by either PR402 or 1 μM of staurosporine, which serves as positive control for this assay (data not shown; all PR402-responsive cells e.g. 4T1 etc. also responded to staurosporine-initiated cell death). (FIG. 20F) PR61 enters PTEN null PC3 prostate cancer cells to initiate their kill. 500 PC3 cells growing on 96 well plates were washed thoroughly with serum-free growth medium. The wash medium was decanted and replaced with culture supernatant from CHO-3E7 cells that had been transfected with either PR61 (lane 2) or an empty pTT5 vector (lane 4). PC3 Cells were incubated with these CHO-3E7 conditioned media for 2 h at 37° C. The media were then removed and the cells were washed twice in serum-free growth medium and finally lysed in CASP3/7 Titer Glo lysis buffer. Half of the lysate was blotted with an anti-6xHis (SEQ ID NO: 243) (GenScript; upper panel), whereas the other half of the lysate was processed for Luciferase measurement (lower panel). The result demonstrates that PR61 contained in the CHO-3E7 cell supernatant (lane 3, 61/I standing for input protein) is able to enter PC3 cells and kill them. (FIG. 20G) The FcRn binding domain (HSA dIII) is dispensable for entry of PR61-like proteins in cancer cells. PR67 and PR68 were expressed in CHO-3E7 cells, purified via IMAC to about 70% homogeneity and dialyzed into a pH 20 mM citrate, 150 mM NaCl, 1 mM DTT pH 6.3 buffer (upper panel). The proteins were diluted 1:2 in serum-free growth medium and applied directly onto cells for 1 h. The cell lysate was blotted with an anti-6xHis mAb (SEQ ID NO: 243) (GenScript) (lower panel). R: Reduced sample; NR: non-reduced sample; Mc: cells treated with serum-free growth medium; B: cells treated with 50% citrate buffer and 50% medium; 137: purified F137 (LUD-p53-HSA) was used as a positive control for cell entry. P: poly-tag protein (GenSript) serving as mAb positive control. (FIG. 2011) F137 is equipotent to PR402 (both used at 1 μM) with respect to the initiation of PC3 cell death, as measured by the Caspase 3/7-Glo Luciferase assay.

[0049] FIGS. 21A to 21E show PK method development scouting for PR402 and PR61. IP-WB of increasing amounts of (0-100 ng) IMAC-purified PR402 spiked into either rat plasma (FIG. 21A), simian plasma (FIG. 21B) or homogenized rat organ extracts (FIG. 21C) using the 3A4.1/A2B1 mAb combination. PR402 (130 KDa) is denoted by stars, whereas contaminants are denoted by crosses and albumin by question marks, respectively. The second lane from the left (A, B) or the PR402 lane (C) is a WB of the starting material by A2B1 showing the presence of PR402 degradation products in the input which are not recognized by the 3A4.1 antibody. About 16 mg/ml total matrix protein was contained in all IPs except for breast extract which was at 6 mg/ml. (FIG. 21D) Increasing volumes of a crude CHO-3E7 cell supernatant expressing PR61, leading to an estimated final amount of 0-200 ngPR61 was spiked into rat plasma (lanes 1-5) or PBS (lanes 6-10) and then processed for IP-WB using a 138G6/F-10 mAb combination. PR61 (120 KDa) is denoted by stars, whereas the 50 KDa and 70 KDa contaminants by crosses. Both contaminants are specifically immuno-precipitated by the 138G6 mAb (compare lane 5 vs. 10). Lane 11 corresponds to a WB of the starting material by F-10 showing the presence of PR61 degradation products in the input which are not recognized by the 138G6 antibody. (FIG. 21E) A crude CHO-3E7 cell supernatant expressing an estimated 50 ng of PR61 (even lanes; stars) or an equal volume of supernatant from mock-transfected CHO-3E7 cells (odd lanes) was spiked into PBS or plasma from a stage IV lung cancer patient (ProMedDx, Norton, MA). Tubes were incubated for t=0 or t=8 h at 37° C. and then subjected to IP-WB with an SP218/F-10 Ab combination, as in (FIG. 21D). Like 138G6, the SP218 mAb also specifically IPs the 50 KDa and 70 KDa proteins (lanes 2 & 6 vs. 4 & 8; crosses). Both contaminants are absent from the mock or PR61 preparation (lanes 9-10), indicating that they pre-existed in the serum of the cancer patient. The experiment also demonstrates that PR61 contained in a crude source like the CHO-3E7 supernatant (which is rich in cell debris and proteases released therefrom) is nevertheless very stable upon prolonged incubation (8 h) in either PBS (physicochemical stability) or cancer serum (resistance to proteases released from cell debris) (compare PR61 band intensity between lanes 2 & 6 and 4 & 8).

[0050] FIGS. 22A to 22C illustrates that purified exogenous PR61 protein (SEQ ID NO:19) kills cultured mammalian cancer cells regardless of endogenous PTEN status (wild-type, mutant or absent PTEN).

[0051] FIG. 22A shows PR61 (120 KDa) that was partially purified by imidazole affinity chromatography. About 2 μg of total semi-purified PR61 protein (SEQ ID NO:19) was loaded in each lane, run in a 4-20% gradient SDS-PAGE gel under reducing (lane 1) or non-reducing conditions (lane 2) and stained with Coomasie blue (left panel) or an anti-6His mAb (SEQ ID NO: 243) (GenScript, Cat. No. A00186) (right panel). Lane P corresponds to Multiple-tag, a synthetic protein containing an 6His epitope (SEQ ID NO: 243) (GenScript, Cat. No. M0101) that serves as positive control for WB.

[0052] FIG. 22B and FIG. 22C. Exogenously applied, semi-pure PR61 protein (SEQ ID NO:19) kills several cancer cells regardless of endogenous PTEN levels. 500 cells of the indicated cell lines growing on 96 well plates were fed with fresh serum-free medium containing 1 μM of PR61 in PBS (from FIG. 22A) or the equivalent volume of PBS alone. Cells were incubated in these media for 2 h at 37° C. The media were then removed, and the cells were washed twice in serum-free growth medium, lysed in CASP3/7 Titer Glo lysis buffer, and processed for Luciferase measurement. The fold increase in arbitrary light units by PR61 is indicated in each case. The result provides strong cellular illustration for a broad anti-cancer action of PR61.

[0053] FIG. 23A illustrates the generation of oHSV2-PRn from oHSV2-GFP and oHSV2-GMCSF through sequential homologous recombinations, as typically used in the art (see Zhao et al, 2014; PMID: 24671154 and FIG. 6D). Note that oHSV2-PR61 virus may contain either the tagged or tagless version of PR61 cDNA (SEQ. ID NO:59 and SEQ ID NO:226, respectively).

[0054] FIG. 23B demonstrates that upon infection of 293T cells with oHSV2-PR61 but not oHSV2-GFP virus, cells produce PR61 protein (130 KDa; SEQ ID NO:227) that can be detected by WB of a total cell lysate using a pan-PTEN mAb (F-1). PR61 co-migrates with PR61 secreted by CHO cells (+; positive control; SEQ ID NO:19). Mock refers to uninfected cells. The levels of PR61 (SEQ ID NO:227) increase at the 96 h time point. The Ab labels endogenous PTEN-S (55 KDa) and PTEN-L (72 KDa).

[0055] FIG. 23C shows the result of a pan-PTEN ELISA demonstrating that oHSV-PR41 infection of VERO cells leads to specific secretion of PR41 protein (SEQ ID NO:224) in the conditioned medium at 24 h post-infection (41/24). In contrast, conditioned medium from uninfected cells (VERO), growth medium (medium) of infection with oHSV2-GFP (GFP/24, GFP/48, GFP/96) does not lead to secretion of endogenous PTEN in the supernatant (for example, because of cell lysis). PR41 protein levels (SEQ ID NO:224) return to background at later time points (41/48, 41/96). “402” corresponds to an aliquot of IMAC-purified PR402 protein (SEQ ID NO:28) that was used as a positive control in the ELISA.

[0056] FIG. 23D shows the detailed genomic map of the oHSV2-PR61 Δ6H (ΔICP34.5/ΔICP47) oncolytic virus disclosed herein (SEQ ID NO:241) (see also FIG. 6D and FIG. 23A).

[0057] FIG. 24 shows that PR61 (SEQ ID NO:227) protein expressed from an oHSV2-PR61 virus exerts strong anti-tumor action against mice bearing subcutaneous syngeneic CT26 colorectal tumors. Mice with tumors of 100 mm³ were split on D1 in control group (n=17), oHSV2-GMCSF (n=8), oHSV2-GFP (n=9) and oHSV2-PR61 (n=10) groups. Mice were injected intra-tumorally on Day 1, Day 4 and Day 7 as shown. There was no discernible difference in the weight of mice across groups throughout the experiment. Student T values were p<0.05 for either oHSV2-GMCSF or oHSV2-GFP group vs. control (*); p<0.01 oHSV2-PR61 group vs. control (**). Despite the apparent higher growth inhibition by oHSV2-PR61 past day 15, the difference between oHSV2-GMCSF and oHSV2-PR61 did not reach statistical significance (NS, p>0.05).

[0058] FIG. 25A shows the experimental set up and treatment of mice bearing subcutaneous syngeneic CT26 colorectal tumors with placebo or oncolytic HSV2 viruses expressing GFP, PR41 (SEQ ID NO:224), PR61 (SEQ ID NO:227) or PR71 (SEQ ID NO:230) protein in combination with an anti-mouse PD1 antibody or its dilution buffer control. Mice were injected intra-tumorally on Day 1, Day 4 with virus or its control (IS buffer) and on Day 7, Day 10 and Day 14 with the anti-PD1 antibody or its control (dilution buffer), as shown.

[0059] FIG. 25B shows the Kaplan-Meier Overall Survival curves corresponding to the monotherapy and placebo arms of FIG. 25A at Day 80 (see FIG. 25G for log-rank significance values).

[0060] FIGS. 25C-25F are break-downs of FIG. 25B allowing for better visualization of the survival results among the various arms, as shown.

[0061] FIG. 25G shows a comparison table of significant differences in the overall survival curves corresponding to all treatment arms of FIG. 25A at D80 based on the log-rank (Mantel-Cox) test (p<0.05*, p<0.01**, p<0.001***, p<0.0001****).

[0062] FIG. 26A shows the result of anti-6His Western Blot (SEQ ID NO: 243) performed on reduced or non-reduced culture supernatant of Expi293 cells transfected with a nivolumab scFv (SEQ ID NO:222 cloned in the pTT5 mammalian expression vector). The nivolumab scFv monomer is seen at the expected MW of 25 KDa, whereas a faint dimer can be seen at 50 KDa in the non-reducing condition. There are no obvious aggregates in this preparation.

[0063] FIG. 26B is a schematic for an oncolytic HSV-2 vector with dual payload, e.g. PR61 cDNA (SEQ ID NO:226) and the nivolumab scFv cDNA (SEQ ID NO:222).

### DETAILED DESCRIPTION OF THE DISCLOSURE

[0064] In 2013, PTEN-L (also known as PTEN-Long or PTENα, a translational isoform expressed from the PTEN mRNA via alternative initiation was identified (Hopkins et al. (2013) PMID: 23744781). The full length human pre-PTEN-L protein (SEQ ID NO:1 corresponding to cDNA SEQ ID NO:177) has a PTEN-L Unique Domain (“LUD”) of 173 additional amino acids (aa) at the N-terminus of the standard PTEN protein (403 aa, SEQ ID NO:2 corresponding to SEQ ID NO:178; herein referred to as “PTEN-S”).

[0065] The PTEN proteins are extremely conserved in mammals. For example, PTEN-S is identical between mouse and rat at the amino acid level (SEQ ID NO:88; the corresponding mouse PTEN-S cDNA is SEQ ID NO:166) and has only one Ser>Thr (i.e., Serine to Threonine) conversion (99.9% identity at the amino acid level) vs. human PTEN-S(SEQ ID NO:2), whereas mature mouse PTEN-L (protein SEQ ID NO:89; cDNA SEQ ID NO:167) has only 10 mutations (98.2% identity at the amino acid level) vs. human PTEN-L (SEQ ID NO:3).

[0066] Mature human PTEN-L (amino acid (aa) 22-576 of SEQ ID NO:3) is secreted in the blood upon cleavage of a 21-amino acid signal peptide leader sequence (SEQ ID NO:4) from the pre-protein (SEQ ID NO:1). The mature human LUD (aa 22-17 of; SEQ ID: NO:5) contains an arginine-rich, Minimal Cell-Penetration Domain (“MCPD”; protein SEQ ID NO:39, cDNA SEQ ID NO:169; whereas MCPD corresponds to aa47-52 of SEQ ID NO:1) mediating efficient cell entry of PTEN-L in >30 cancer cell lines, yet much less so in “normal” cells (e.g., MCF10A; Hopkins et al, 2013: PMID: 23744781). The MCPD is required for penetration but it may synergize with other determinants such as the Membrane-Binding Domain (MBD; SEQ ID NO:40, which corresponds to aa151-173 of SEQ ID NO:1 at the C-terminal portion of the LUD (Hopkins et al. (2013) PMID: 23744781; Masson et al. (2016) PMID: 26527737). The LUD itself is necessary and sufficient for cellular entry, allowing for subsequent potentiation of anti-cancer action of cargo proteins like PTEN-S and p53 (Hopkins et al. (2013) PMID: 23744781).

[0067] Three naturally occurring PTEN-L isoforms or deletion mutants are known, PTEN-M (also referred to herein as PTENβ; SEQ ID: NO 6), PTEN-N(SEQ ID: NO 7) and PTEN-O (SEQ ID: NO 8) (Tzani et al. (2016) PMID: 27249819). Per global convention, amino-acid numbering of the various PTEN isoforms is henceforth based on the longest PTEN-L pre-protein (SEQ ID NO:1; Pulido et al. (2014) PMID: 24985344) unless specified. As such, all variants are considered to be progressive N-terminus deletion mutants of PTEN-L which still contain PTEN-S in consecutive fashion (Malaney et al, 2017: PMID: 28289760), and hence, by extension can be described as having a deletion-specific (M, N & 0) Unique Domain fused in frame upstream of PTEN-S, that is namely defined herein as MUD (SEQ ID NO:9), NUD (SEQ ID NO:10) and OUD (SEQ ID NO:11), respectively (Tzani et al, 2016: PMID: 27249819).

[0068] Since the catalytic phosphatase domain resides in the common PTEN-S sequence, all PTEN-L isoforms are by definition protein and lipid phosphatases. While PTEN-L is the only one of its peers that can be directly secreted in human serum, PTEN-L and PTEN-M appear to be indistinguishable in terms of cell and nuclear membrane penetration, phosphatase activity and anti-cancer action (Hopkins et al, 2013: PMID: 23744781; Tzani et al, 2016: PMID: 27249819; Liang et al, 2017: PMID: 28332494). Because of its inherent human serum secretion and compatibility, the spontaneous cancer cell permeability, the multivalent mechanism of action (pi3K/AKT/mTOR, ERK, VEGF inhibition), the strong anti-cancer monotherapy action leading to extension of overall survival in cells & xenografts in several preclinical models, the fact that transgenic mice over-expressing the PTEN gene are not only viable and cancer-resistant but also achieve better blood sugar control and live significantly longer than the littermates,

[0069] PTEN-L is a prime candidate drug for anti-viral and anti-cancer therapy across all oncology and hematology indications (Wu et al, 2017: PMID: 28783500; Lee et al, 2018: PMID: 29858604). However, in spite of its putative importance as a novel anti-cancer therapeutic, PTEN-L has proven extremely hard to manufacture, given that in all published cases, the protein is reportedly fret with low yields, and physicochemical instability (Hopkins et al, 2013: PMID: 23744781; Masson et al, 2016: PMID: 26527737; Wu et al, 2017 PMID: 28783500).

[0070] In contrast to PTEN-L, recombinant PTEN-S or p53 protein does not possess autonomous cell penetration capabilities, wherein expression of PTEN-S within cells requires cell transfection or viral transduction using the PTEN-S cDNA, or encapsulation of the tumor suppressor protein in a membrane-like chemical structure, like a liposome or a cationic lipid (Altinoglu et al, 2016; PMID: 27748775) or via hybrid protein-DNA hybrid nanostructures (Ryu et al, 2020; PMID: 32057052). Once expressed inside cancer cells, however, PTEN-S can cause their death across essentially all known cancer indications. While transfection of PTEN-S has no medical applicability, its protein encapsulation is quite cumbersome from a manufacturing perspective; similarly, tumor suppressor gene therapy has only been approved for Adenoviral-53, and only in China (Gendicine; Goswami et al, 2019; PMID: 31069169). It follows that manufacturable PTEN-S fusion proteins would have much higher medical, therapeutic and commercial value than any other delivery technology known in the art.

[0071] However, therapeutically useful proteins, such as the PTEN proteins may not always be “developable”. As an example, proteins may be expressed at economically or industrially irrelevant amounts (e.g. <5 μg/ml of secreted protein in the supernatant of transiently transfected CHO cells) or may be biophysically unstable (e.g. due to degradation or aggregation or lack of post-translational modifications in case of bacterial expression) or may have unsuitable pharmacokinetic profiles (e.g. instability in human serum, or very low serum half-life or requirement for special buffers or excipients). The following approaches are known to potentially increase developability and/or improve the medical relevance of such proteins: (a) Genetic fusion of the protein to a naturally long-half-life protein or protein domain such as the Fc (antibody tail) domain, transferrin and human serum albumin (HSA) proteins; or fusion to an inert polypeptide such as XTEN (also known as recombinant PEG or “rPEG”), or a homo amino acid polymer (HAP; HAPylation), or aproline-alanine-serine polymer (PAS; PASylation), or an elastin-like peptide (ELP; ELPylation); (b) Chemical conjugation of the protein to repeat chemical moieties, e.g., to PEG (PEGylation) or hyaluronic acid, so as to increase the hydrodynamic radius of the target protein; (c) Polysialylation of the protein or fusion thereof to a negatively charged, highly sialylated peptide; (d) Non-covalent binding of the protein to normally long-half-life proteins such as Human Serum Albumin (HSA),human IgG, or transferrin; (e) Chemically conjugation of the protein to HSA, Fc or transferrin (reviewed in Strohl, 2015, PMID: 26177629).

[0072] Embodiments according to the present disclosure will be described more fully hereinafter. Aspects of the disclosure may, however, be embodied in different forms and should not be construed as limited to the embodiments set forth herein. Rather, these embodiments are provided so that this disclosure will be thorough and complete, and will fully convey the scope of the invention to those skilled in the art. The terminology used in the description herein is for the purpose of describing particular embodiments only and is not intended to be limiting.

[0073] Unless otherwise defined, all terms (including technical and scientific terms) used herein have the same meaning as commonly understood by one of ordinary skill in the art to which this invention belongs. It will be further understood that terms, such as those defined in commonly used dictionaries, should be interpreted as having a meaning that is consistent with their meaning in the context of the present application and relevant art and should not be interpreted in an idealized or overly formal sense unless expressly so defined herein. While not explicitly defined below, such terms should be interpreted according to their common meaning.

[0074] The terminology used in the description herein is for the purpose of describing particular embodiments only and is not intended to be limiting of the invention. All publications, patent applications, patents and other references mentioned herein are incorporated by reference in their entirety.

[0075] The practice of the present technology will employ, unless otherwise indicated, conventional techniques of tissue culture, immunology, molecular biology, microbiology, cell biology, and recombinant DNA, which are within the skill of the art.

[0076] Unless the context indicates otherwise, it is specifically intended that the various features of the invention described herein can be used in any combination. Moreover, the disclosure also contemplates that in some embodiments, any feature or combination of features set forth herein can be excluded or omitted. To illustrate, if the specification states that a complex comprises components A, B and C, it is specifically intended that any of A, B or C, or a combination thereof, can be omitted and disclaimed singularly or in any combination.

[0077] Unless explicitly indicated otherwise, all specified embodiments, features, and terms intend to include both the recited embodiment, feature, or term and biological equivalents thereof.

[0078] All numerical designations, e.g., pH, temperature, time, concentration, and molecular weight, including ranges, are approximations which are varied (+) or (−) by increments of 1.0 or 0.1, as appropriate, or alternatively by a variation of +/−15%, or alternatively 10%, or alternatively 5%, or alternatively 2% and such ranges are included. It is to be understood, although not always explicitly stated, that all numerical designations are preceded by the term “about”. It also is to be understood, although not always explicitly stated, that the reagents described herein are merely exemplary and that equivalents of such are known in the art.

[0079] Throughout this disclosure, various publications, patents and published patent specifications may be referenced by an identifying citation or by an Arabic numeral. The full citation for the publications identified by an Arabic numeral are found immediately preceding the claims. The disclosures of these publications, patents and published patent specifications are hereby incorporated by reference into the present disclosure in their entirety to more fully describe the state of the art to which this invention pertains.

### Definitions

[0080] The practice of the present technology will employ, unless otherwise indicated, conventional techniques of organic chemistry, pharmacology, immunology, molecular biology, microbiology, cell biology and recombinant DNA, which are within the skill of the art. See, e.g., Sambrook, Fritsch and Maniatis, Molecular Cloning: A Laboratory Manual, 2^{nd} edition (1989); Current Protocols In Molecular Biology (F. M. Ausubel, et al. eds., (1987)); the series Methods in Enzymology (Academic Press, Inc.): PCR 2: A Practical Approach (M. J. MacPherson, B. D. Hames and G. R. Taylor eds. (1995)), Harlow and Lane, eds. (1988) Antibodies, a Laboratory Manual, and Animal Cell Culture (R.I. Freshney, ed. (1987)).

[0081] As used in the description of the invention and the appended claims, the singular forms “a,” “an” and “the” are intended to include the plural forms as well, unless the context clearly indicates otherwise.

[0082] As used herein, the term “comprising” is intended to mean that the compositions and methods include the recited elements, but do not exclude others. As used herein, the transitional phrase consisting essentially of (and grammatical variants) is to be interpreted as encompassing the recited materials or steps and those that do not materially affect the basic and novel characteristic(s) of the recited embodiment. Thus, the term “consisting essentially of” as used herein should not be interpreted as equivalent to “comprising”. “Consisting of” shall mean excluding more than trace elements of other ingredients and substantial method steps for administering the compositions disclosed herein. Aspects defined by each of these transition terms are within the scope of the present disclosure.

[0083] The term “about” as used herein when referring to a measurable value such as an amount or concentration and the like, is meant to encompass variations of 20%, 10%, 5%, 1%, 0.5%, or even 0.1% of the specified amount.

[0084] As used herein, the terms “increased”, “decreased”, “high”, “low” or any grammatical variation thereof refer to a variation of about 90%, 80%, 50%, 20%, 10%, 5%, 1%, 0.5%, or even 0.1% of the reference composition, polypeptide, protein, etc.

[0085] The phrase “lacks expression of” a protein/polypeptide refers to that (i) the protein/polypeptide is note encoded or present, and/or (2) the protein/polypeptide is present at a low level compared to a control (for example, a non-cancer cell or tissue).

[0086] The terms or “acceptable,” “effective,” or “sufficient” when used to describe the selection of any components, ranges, dose forms, etc. disclosed herein intend that said component, range, dose form, etc. is suitable for the disclosed purpose.

[0087] Also as used herein, “and/or” refers to and encompasses any and all possible combinations of one or more of the associated listed items, as well as the lack of combinations when interpreted in the alternative (“or”).

[0088] The term “fusion protein” refers to a polypeptide comprising amino acid sequences from at least two different sources in tandem. A fusion protein may also be referred to as a fusion polypeptide, a chimeric protein, or a chimeric polypeptide. A fusion protein may be encoded by a nucleic acid molecule having two or more coding regions from different sources that are joined in-frame, such that the nucleic acid molecule encodes the fusion protein. In an embodiment, the fusion protein comprises PTEN-L or PTEN and a second portion comprising human serum albumin and an optional affinity tag. In another embodiment the fusion protein comprises human serum albumin and a second portion comprising PTEN-L or PTEN and an affinity tag. In other embodiments, Once part of the fusion construct or protein, albumin and PTEN or PTEN-L may each be referred to as a “portion,” “region” or “moiety” of the said fusion construct or protein.

[0089] The term PTEN is an abbreviation of Phosphatase and Tensin Homolog. As used herein it intends a genus of polypeptides or proteins comprising or consisting essentially of, or yet further consisting of, a PTEN or PTEN-L or a fragment, analogue, variant, mutant, isoform or equivalent of the PTEN or PTEN-L with the proviso that the PTEN or PTEN-L enzymatic activity is retained and optionally can be expressed at a reasonable quantity. Such activity can be measured in an in vitro assay such as the Malachite Green phosphatase assay or an in vivo assay, such as an assay measuring cell penetration in a mammalian cell or another cell-based assay measuring PTEN protein tumor suppressor function, such as an assay measuring initiation of cancer cell death as is known in the art or described herein. Non-limiting examples of a PTEN include PTEN-L, PTEN-M, PTEN-N, PTEN-O, PTEN-S and minimal PTEN fragment (which is also referred to herein as minimal PTEN-S). In certain embodiments, the terms PTEN and PTEN-L are used interchangeable, especially when followed by “or a fragment”.

[0090] In certain embodiments, when referring to an amino acid sequence or a polypeptide or a protein, the term human “PTEN-L” or “PTEN-L portion” or “PTEN-L region” or “PTEN-L moiety” comprises, or consists essentially of, or yet further consists of polypeptides having the SEQ ID NO:1 (human pre-PTEN-L), or SEQ ID NO:3 (mature human PTEN-L) as well as any and all fragments, minimal fragments, analogues, mutant, isoform, equivalent and variants of each thereof.

[0091] As used herein, a fragment of a protein or a polypeptide provides a protein or polypeptide truncated at N terminal, C terminal or both.

[0092] An equivalent of a protein or a polypeptide (referred to herein as the reference) shares at least 50% (or at least 60%, or at least 70%, or at least 80%, or at least 90%) identity to the reference and retains the reference's function and manufacturability.

[0093] As used herein, the terms “function” “activity” and “enzymatic activity” are used interchangeable. For example, an activity of (a) a PTEN, (b) a fragment, analogue, variant, mutant, or equivalent of a PTEN, or (c) a fusion protein comprising (a) and/or (b) may refers to penetrating cell and/or nuclear membrane, acting as a phosphatase and providing an anti-cancer therapeutic result. Such activity can be measured in an in vitro assay such as the Malachite Green phosphatase assay or an in vivo assay, such as an assay measuring cell penetration in a mammalian cell, or another cell-based assay measuring PTEN protein tumor suppressor function, such as an assay measuring initiation of cancer cell death, as is known in the art or described herein.

[0094] An equivalent of a polynucleotide (referred to herein as the reference) shares at least 50% (or at least 60%, or at least 70%, or at least 80%, or at least 90%) identity to the reference, and encodes the same polypeptide as the one encoded by the reference, or encodes an equivalent of the polypeptide encoded by the reference.

[0095] To arrive at a position or a consecutive segment of a test sequence equivalent to (or corresponding to) an/a amino acid/nucleotide residue or a consecutive segment of a reference sequence, a sequence alignment is performed between the test and reference sequences. The positions or segments aligned to each other are determined as equivalents.

[0096] The term “PTEN equivalent,” comprises, or consists essentially of, or yet further consists of, polypeptides which can be expressed at a reasonable quantity and which still retains or improves on PTEN protein activity in an in vitro assay such as the Malachite Green phosphatase assay or an in vivo assay, such as an assay measuring cell penetration in a mammalian cell or another cell-based assay measuring PTEN protein tumor suppressor function, such as an assay measuring initiation of cancer cell death, as is known in the art or described herein.

[0097] The term “minimal PTEN fragment”, comprises, or consists essentially of, or yet further consists of, polypeptides which have one or more modified amino acids, but retain at least 90% sequence similarity or identity with SEQ ID NO:162, and which fragment can be expressed at a reasonable quantity and which fragment still retains or improves on PTEN protein activity in an in vitro assay such as the Malachite Green phosphatase assay or an in vivo assay, such as an assay measuring cell penetration in a mammalian cell or another cell-based assay measuring PTEN protein tumor suppressor function, such as an assay measuring initiation of cancer cell death, as is known in the art [for instance, the minimal PTEN fragment of SEQ ID NO:162 retains catalytic activity in cancer cells (Odriozola et al, 2007; PMID: 17565999)] or described herein.

[0098] The term “analogue” refers to an equivalent having one or more modified amino acids and one or more amino acids replaced with another amino acid. Such modification may include but is not limited to conjugation with a molecule (for example, a small molecule, a cytotoxic molecule, a linker, a pH-sensitive linker, and/or a thiol linker), sialylation, polysialylation, O-glycosylation, N-glycosylation, myristoylation, palmitoylation, isoprenylation or prenylation, glipyatyon, lipoylation, phosphopantetheinylation, ethanolamine phosphoglycerol attachment, diphthamide formation, hypusine formation, acylation, acetylation, formylation, alkylation, methylation, amidation, citrullination, deamidation, eliminylation, ISGylation, SUMOylation, ubiquitination, neddylation, pupylation, biotinylation, carbamylation, oxidation, pegylation, glycation, carbamylation, carbonylation, spontaneous isopeptide bond formation, butyrylation, gamma-carboxylation, malonylation, hydroxylation, iodination, nucleotide addition, phosphate ester (O-linked) or phosphoramidate (N-linked) formation, phosphorylation, adenylylation, uridylylation, propionylation, pyroglutamate formation, S-glutathionylation, S-nitrosylation, S-sulfenylation, S-sulfinylation, S-sulfonylation, succinylation, and/or sulfation.

[0099] The term “PTEN analogue” comprises, or consists essentially of, or yet further consists of, polypeptides which have one or more modified or replaced amino acids, but retain at least 90% sequence similarity or identity with a PTEN protein (for example, SEQ ID NO:1 or SEQ ID NO:3, including but not limited to human PTEN-M (SEQ ID NO:6), human PTEN-N(SEQ ID NO:7), human PTEN-O (SEQ ID NO:8), human PTEN-S(SEQ ID NO:2), mouse PTEN-S(SEQ ID NO:88), mature mouse PTEN-L (SEQ ID NO:89), which analogue can be expressed at a reasonable quantity and which analogue still retains or improves on PTEN protein activity in an in vitro assay such as the Malachite Green phosphatase assay or an in vivo assay, such as an assay measuring cell penetration in a mammalian cell or another cell-based assay, such as an assay measuring initiation of cancer cell death, as is known in the art or described herein.

[0100] As used herein, the term a polypeptide/protein variant comprises, or consists essentially of, or yet further consists of an equivalent of the polypeptide/protein and one or more additional amino acids.

[0101] The term “PTEN variant” comprises or consists essentially of, or yet further consists of, polypeptides which have one or more additional amino acids, typically having less than 40 or preferably less than 15 additional amino acids at either the N-terminus or the C-terminus of PTEN protein, or both, which variant can be expressed at a reasonable quantity and which variant still retains or improves on PTEN activity in an in vitro assay such as the Malachite Green phosphatase assay or an in vivo assay, such as an assay measuring cell penetration in a mammalian cell or another cell-based assay, such as an assay measuring initiation of cancer cell death, as is known in the art or described herein.

[0102] Human serum albumin (HSA) is a multi-functional protein has a long average half-life in the 19-day range. At a concentration of 50 mg/mL (0.6 mM), HSA is the most abundant protein in human plasma, where it has several functions, including maintenance of plasma pH, metabolite and fatty acid transport, and a role in maintaining blood pressure. HSA, which is at the upper limit of size for glomerular filtration of proteins by the kidney, is strongly anionic, which helps even more to retard its filtration via the kidney. Like IgGs, HSA also binds a specific receptor called FcRn or neonatal receptor in a pH-dependent manner, albeit at a site different from—and via a mechanism distinct from—that of IgG binding, and is recycled similarly to IgGs, resulting in its extended half-life. HSA also tends to accumulate in tumors and in inflamed tissues, which suggests that fusion or binding to albumin may potentially help to target proteins or peptides to those sites. The simian serum albumin (SSA; SEQ ID NO:90), rat serum albumin (RSA; SEQ ID NO:91), mouse serum albumin (MSA SEQ ID NO:92) serve similar functions and are fairly conserved vs. HSA (SEQ ID NO:12-13). All serum albumins (SAs) are secreted from the cell following cleavage of a highly conserved signal peptide (SEQ ID NO:93-96). Several naturally occurring (e.g. the Casebrook D494Q) or engineered (e.g. the D108A) HSA mutations decrease, whereas other engineered mutations (e.g. K573P) increase the mutant HSA's affinity for human FcRn. All SAs consist of 3 major domains, referred as dI (aa1-197), dII (aa198-381) and dIII (aa382-585)(amino acid numbering refers to SEQ ID NO:13) and bind their cognate FcRn via the C-terminal portion of dIII, a region which is quite divergent among mammals. As such, there is remarkable species specificity in SA recycling function by FcRn, whereby injected HSA in living mice for example are ignored by mouse FcRn over the endogenous MSA ligand. The species-specific FcRn-SA binding property appears to have been lost in cultured human or mouse cancer cells—these rapidly take up MSA, RSA or HSA without any obvious restriction (Swiercz et al, 2017; PMID: 27974681). As such, the choice of SA has important implications for therapeutic drug development of albumin fusions, especially with respect to tissue biodistribution of exogenous therapeutic albumin fusions (reviewed in Sand et al, 2015; PMID: 25674083).

[0103] The term “serum albumin protein”, or “Serum Albumin—SA” which is used interchangeably with “albumin portion” or “albumin region” or “albumin moiety” may refers to “Human Serum Albumin—HSA”, or “Simian Serum Albumin-SSA”, or “Rat Serum Albumin—RSA” or “Mouse Serum Albumin—MSA”. In one embodiment, it comprises, or consists essentially of, or yet further consists of polypeptides having the SEQ ID NO:12 (HSA pre-protein), or SEQ ID NO:13 (mature HSA), or SEQ ID NO:90 (mature SSA), or SEQ ID NO:91 (mature RSA), or SEQ ID NO:92 (mature MSA), as well as any and all fragments, minimal fragments, analogues and variants thereof.

[0104] The term “albumin equivalent,” comprises, or consists essentially of, or yet further consists of, polypeptides which can be expressed at a reasonable quantity and which still retains or improves on certain albumin properties, including the binding of the albumin fragment to an FcRn receptor, as is known in the art or described herein.

[0105] The term “minimal albumin fragment”, comprises, or consists essentially of, or yet further consists of, polypeptides which have one or more modified amino acids, but retain at least 90% sequence similarity or identity with SEQ ID NO:163, and which fragment can be expressed at a reasonable quantity and which fragment still retains or improves on certain albumin properties, including the binding of the albumin fragment to an FcRn receptor, as is known in the art or described herein.

[0106] The term “albumin analogue” comprises, or consists essentially of, or yet further consists of, polypeptides which have one or more modified or replaced amino acids, but retain at least 90% sequence similarity or identity with a serum albumin (for example, SEQ ID NO:12-13, 90-92 and 163), which analogue can be expressed at a reasonable quantity and which analogue still retains or improves on certain albumin properties, including the binding of the albumin fragment to an FcRn receptor, as is known in the art or described herein.

[0107] The term “albumin variant” comprises, or consists essentially of, or yet further consists of, polypeptides which have one or more additional amino acids, but retain at least 90% sequence similarity or identity with SEQ ID NO:12-13, 90-92 and 163, which analogue can be expressed at a reasonable quantity and which analogue still retains or improves on certain albumin properties, including the binding of the albumin fragment to an FcRn receptor, as is known in the art or described herein.

[0108] Signal peptides are found in proteins that are targeted to the endoplasmic reticulum and eventually destined to be either secreted/extracellular/periplasmic/etc., retained in the lumen of the endoplasmic reticulum, of the lysosome or of any other organelle along the secretory pathway or to be I single-pass membrane proteins. The signal sequence is usually presented in the pre-protein and/or pro-protein and removed in the mature protein. In certain embodiment, a signal peptide as used herein directs a fusion protein to be secreted from a host cell. In one embodiment, the signal peptide is at the N-terminal of the fusion protein for secretion and/or is selected from the group of: an HSA signal peptide, an SSA signal peptide, an RSA signal peptide, an MSA signal peptide, a signal peptide of murine α2-macroglobulin, a murine fibrinogen signal peptide, a murine al-antitrypsin signal peptide, a murine IgGκ chain signal peptide, a human IgG heavy chain signal peptide, a human CD33 signal peptide, or an artificial signal peptide. In a further embodiment, the signal peptide comprises an amino acid sequence selected from the group of SEQ ID NOs:93-105. In yet a further embodiment, the signal peptide is encoded by an engineered polynucleotide sequence selected from the group of: SEQ ID NO:180-192, or a sequence at least 90% identical thereto which encodes the same amino acid sequence as SEQ ID NO:93-105, respectively.

[0109] The term “affinity tag” refers to a polypeptide that may be included within a fusion protein to allow detection of the fusion protein and/or purification of the fusion protein from the cellular milieu using a ligand that is able to bind to, i.e., has affinity for, the affinity tag. The ligand may be, but is not limited to, an antibody, a resin, or a complementary polypeptide. An affinity tag may comprise a small peptide, commonly a peptide of approximately 4 to 16 amino acids in length, or it may comprise a larger polypeptide. Commonly used affinity tags include polyarginine, FLAG, V5, polyhistidine, c-Myc, Strep II, maltose binding protein (MBP), N-utilization substance protein A (NusA), thioredoxin (Trx), and glutathione S-transferase (GST), among others (for examples, see GST Gene Fusion System Handbook-Sigma-Aldrich). In an embodiment the affinity tag is a polyhistidine tag, for example a His₆ tag (SEQ ID NO: 243). The inclusion of an affinity tag in a fusion protein allows the fusion protein to be purified from the cellular milieu by affinity purification, using an affinity medium that is able to tightly and specifically bind the affinity tag. The affinity medium may comprise, for example, a metal-charged resin or a ligand covalently linked to a stationary phase (matrix) such as agarose or metal beads. For example, polyhistidine tagged fusion proteins (also referred to as His tagged fusion proteins) can be recovered by immobilized metal ion chromatography using Ni′ or Co′ loaded resins, anti-FLAG affinity gels may be used to capture FLAG tagged fusion proteins, and glutathione cross-linked to a solid support such as agarose may be used to capture GST tagged fusion proteins.

[0110] As used herein the terms “purification”, “purifying”, or “separating” refer to the process of isolating one or more polypeptides from a complex mixture, such as a cell lysate or a mixture of polypeptides. The purification, separation, or isolation need not be complete, i.e., some components of the complex mixture may remain with the one or more polypeptides after the purification process. However, the product of purification should be enriched for the one or more polypeptides relative to the complex mixture before purification and a significant portion of the other components initially present within the complex mixture should be removed by the purification process.

[0111] The term “cell” as used herein may refer to either a prokaryotic or eukaryotic cell, optionally obtained from a subject or a commercially available source.

[0112] “Eukaryotic cells” comprise all of the life kingdoms except monera. They can be easily distinguished through a membrane-bound nucleus. Animals, plants, fungi, and protists are eukaryotes or organisms whose cells are organized into complex structures by internal membranes and a cytoskeleton. The most characteristic membrane-bound structure is the nucleus. Unless specifically recited, the term “host” includes a eukaryotic host, including, for example, yeast, higher plant, insect and mammalian cells. Non-limiting examples of eukaryotic cells or hosts include simian, bovine, porcine, murine, rat, avian, reptilian and human, e.g., HEK293 cells, Chinese Hamster Ovary (CHO) cells and 293T cells.

[0113] “Prokaryotic cells” that usually lack a nucleus or any other membrane-bound organelles and are divided into two domains, bacteria and archaea. In addition to chromosomal DNA, these cells can also contain genetic information in a circular loop called an episome. Bacterial cells are very small, roughly the size of an animal mitochondrion (about 1-2 μm in diameter and 10 μm long). Prokaryotic cells feature three major shapes: rod shaped, spherical, and spiral. Instead of going through elaborate replication processes like eukaryotes, bacterial cells divide by binary fission. Examples include but are not limited to Bacillus bacteria, E. coli bacterium, and Salmonella bacterium.

[0114] The term “encode” as it is applied to nucleic acid sequences refers to a polynucleotide which is said to “encode” a polypeptide if, in its native state or when manipulated by methods well known to those skilled in the art, can be transcribed and/or translated to produce the mRNA for the polypeptide and/or a fragment thereof. The antisense strand is the complement of such a nucleic acid, and the encoding sequence can be deduced therefrom.

[0115] The terms “equivalent” or “biological equivalent” are used interchangeably when referring to a particular molecule, biological, or cellular material and intend those having minimal homology while still maintaining desired structure or functionality (for example, having a similar function activity). It should be understood, without being explicitly stated that when referring to an equivalent or biological equivalent to a reference polypeptide, protein, or polynucleotide, that an equivalent or biological equivalent has the recited structural relationship to the reference polypeptide, protein, or polynucleotide and equivalent or substantially equivalent biological activity. For example, non-limiting examples of equivalent polypeptides, proteins, or polynucleotides include a polypeptide, protein or polynucleotide having at least 60%, or alternatively at least 65%, or alternatively at least 70%, or alternatively at least 75%, or alternatively 80%, or alternatively at least 85%, or alternatively at least 90%, or alternatively at least 95% identity thereto or for polypeptide, polynucleotide or protein sequences across the length of the reference polynucleotide. Alternatively, an equivalent polypeptide is one that is encoded by a polynucleotide or its complement that hybridizes under conditions of high stringency to a polynucleotide encoding such reference polypeptide sequences and that have substantially equivalent or equivalent biological activity. Conditions of high stringency are described herein and incorporated herein by reference. Alternatively, an equivalent thereof is a polypeptide encoded by a polynucleotide or a complement thereto, having at least 70%, or alternatively at least 75%, or alternatively 80%, or alternatively at least 85%, or alternatively at least 90%, or alternatively at least 95% identity, or at least 97% sequence identity across the length of the reference polynucleotide to the reference polynucleotide, e.g., the wild-type polynucleotide. Such equivalent polypeptides have the same biological activity as the reference polynucleotide.

[0116] Non-limiting examples of equivalent polypeptides, include a polynucleotide having at least 60%, or alternatively at least 65%, or alternatively at least 70%, or alternatively at least 75%, or alternatively 80%, or alternatively at least 85%, or alternatively at least 90%, or alternatively at least 95%, or alternatively at least 97%, identity to a reference polynucleotide. An equivalent also intends a polynucleotide or its complement that hybridizes under conditions of high stringency to a reference polynucleotide. Such equivalent polypeptides have the same biological activity as the reference polynucleotide.

[0117] A polynucleotide or polynucleotide region (or a polypeptide or polypeptide region) having a certain percentage (for example, 80%, 85%, 90%, or 95%) of “sequence identity” to another sequence means that, when aligned, that percentage of bases (or amino acids) are the same in comparing the two sequences across the length of the reference polynucleotide. The alignment and the percent homology or sequence identity can be determined using software programs known in the art, for example those described in Current Protocols in Molecular Biology (Ausubel et al., eds. 1987) Supplement 30, section 7.7.18, Table 7.7.1. In certain embodiments, default parameters are used for alignment. A non-limiting exemplary alignment program is BLAST, using default parameters. In particular, exemplary programs include BLASTN and BLASTP, using the following default parameters: Genetic code=standard; filter=none; strand=both; cutoff=60; expect=10; Matrix=BLOSUM62; Descriptions=50 sequences; sort by=HIGH SCORE; Databases=non-redundant, GenBank+EMBL+DDBJ+PDB+GenBank CDS translations+SwissProtein+SPupdate+PIR. Details of these programs can be found at the following Internet address: ncbi.nlm.nih.gov/cgi-bin/BLAST. Sequence identity and percent identity can be determined by incorporating them into clustalW (available at the web address:genome.jp/tools/clustalw/, last accessed on Jan. 13, 2017).

[0118] “Homology” or “identity” or “similarity” refers to sequence similarity between two peptides or between two nucleic acid molecules. Homology can be determined by comparing a position in each sequence that may be aligned for purposes of comparison. When a position in the compared sequence is occupied by the same base or amino acid, then the molecules are homologous at that position. A degree of homology between sequences is a function of the number of matching or homologous positions shared by the sequences. An “unrelated” or “non-homologous” sequence shares less than 40% identity, or alternatively less than 25% identity, with one of the sequences of the present disclosure.

[0119] As used herein, the term “at least 90% identical” refers to an identity of two compared sequences (polynucleotides or polypeptides) of about 90% to about 100%. It also include an identity of at least at least 91%, at least 92%, at least 93%, at least 94%, at least 95%, at least 96%, at least 97%, at least 98%, at least 99%, about 91% to about 100%, about 92% to about 100%, about 93% to about 100%, about 94% to about 100%, about 95% to about 100%, about 96% to about 100%, about 97% to about 100%, about 98% to about 100%, or about 99% to about 100%.

[0120] “Homology” or “identity” or “similarity” can also refer to two nucleic acid molecules that hybridize under stringent conditions.

[0121] As used herein, the terms “retain” “similar” and “same” are used interchangeably while describing a function, an activity or an functional activity of a polynucleotide, a protein and/or a peptide, referring to a functional activity of at least about 20% (including but not limited to: at least about 30%, at least about 40%, at least about 50%, at least about 60%, at least about 70%, at least about 80%, at least about 90%, at least about 95%, at least about 97%, or about 100%) of the activity of the reference protein, polynucleotide and/or peptide.

[0122] “Hybridization” refers to a reaction in which one or more polynucleotides react to form a complex that is stabilized via hydrogen bonding between the bases of the nucleotide residues. The hydrogen bonding may occur by Watson-Crick base pairing, Hoogstein binding, or in any other sequence-specific manner. The complex may comprise two strands forming a duplex structure, three or more strands forming a multi-stranded complex, a single self-hybridizing strand, or any combination of these. A hybridization reaction may constitute a step in a more extensive process, such as the initiation of a PCR reaction, or the enzymatic cleavage of a polynucleotide by a ribozyme.

[0123] Examples of stringent hybridization conditions include: incubation temperatures of about 25° C. to about 37° C.; hybridization buffer concentrations of about 6×SSC to about 10×SSC; formamide concentrations of about 0% to about 25%; and wash solutions from about 4×SSC to about 8×SSC. Examples of moderate hybridization conditions include: incubation temperatures of about 40° C. to about 50° C.; buffer concentrations of about 9×SSC to about 2×SSC; formamide concentrations of about 30% to about 50%; and wash solutions of about 5×SSC to about 2×SSC. Examples of high stringency conditions include: incubation temperatures of about 55° C. to about 68° C.; buffer concentrations of about 1×SSC to about 0.1×SSC; formamide concentrations of about 55% to about 75%; and wash solutions of about 1×SSC, 0.1×SSC, or deionized water. In general, hybridization incubation times are from 5 minutes to 24 hours, with 1, 2, or more washing steps, and wash incubation times are about 1, 2, or 15 minutes. SSC is 0.15 M NaCl and 15 mM citrate buffer. It is understood that equivalents of SSC using other buffer systems can be employed. In one aspect, an equivalent polynucleotide is one that hybridizes under stringent conditions to a reference polynucleotide or its complement. In another aspect, an equivalent polypeptide is a polypeptide that is encoded by a polynucleotide is one that hybridizes under stringent conditions to a reference polynucleotide or its complement.

[0124] As used herein, “expression” refers to the process by which polynucleotides are transcribed into mRNA and/or the process by which the transcribed mRNA is subsequently being translated into peptides, polypeptides, or proteins. If the polynucleotide is derived from genomic DNA, expression may include splicing of the mRNA in a eukaryotic cell.

[0125] The term “isolated” or a grammatical variation thereof as used herein refers to molecules or biologicals or cellular materials being substantially free from other materials.

[0126] As used herein, the term “functional” may be used to modify any molecule, biological, or cellular material to intend that it accomplishes a particular, specified effect.

[0127] As used herein, the terms “nucleic acid sequence” and “polynucleotide” are used interchangeably to refer to a polymeric form of nucleotides of any length, either ribonucleotides or deoxyribonucleotides. Thus, this term includes, but is not limited to, single-, double-, or multi-stranded DNA or RNA, genomic DNA, complementary DNA (cDNA), DNA-RNA hybrids, or a polymer comprising purine and pyrimidine bases or other natural, chemically or biochemically modified, non-natural, or derivatized nucleotide bases. In certain embodiments, the polynucleotide comprises and/or encodes a messenger RNA (mRNA), a short hairpin RNA, and/or small hairpin RNA. In one embodiment, the polynucleotide is or encodes an mRNA. In certain embodiments, the polynucleotide is a double-strand (ds) DNA, such as an engineered ds DNA or a ds cDNA synthesized from a single-stranded RNA.

[0128] As used herein, the terms “engineered” “synthetic” “recombinant” and “non-naturally occurring” are interchangeable and indicate intentional human manipulation, for example, a modification from its naturally occurring form, and/or a sequence optimization.

[0129] The term “protein”, “peptide” and “polypeptide” are used interchangeably and in their broadest sense to refer to a compound of two or more subunits of amino acids, amino acid analogs or peptidomimetics. The subunits may be linked by peptide bonds. In another aspect, the subunit may be linked by other bonds, e.g., ester, ether, etc. A protein or peptide must contain at least two amino acids and no limitation is placed on the maximum number of amino acids which may comprise a protein's or peptide's sequence. As used herein the term “amino acid” refers to either natural and/or unnatural or synthetic amino acids, including glycine and both the D and L optical isomers, amino acid analogs and peptidomimetics.

[0130] As used herein, a consecutive amino acid sequence refers to a sequence having at least two amino acids. However, it is noted that a consecutive amino acid sequence of a first part and a second part does not limit the amino acid sequence to have the first part directly conjugated to the second part. It is also possible that the first part is linked to the second part via a third part, such as a link, thus forming one consecutive amino acid sequence.

[0131] As used herein, the terms “conjugate,” “conjugated,” “conjugating,” and “conjugation” refer to the formation of a bond between molecules, and in particular between two amino acid sequences and/or two polypeptides. Conjugation can be direct (i.e. a bond) or indirect (i.e. via a further molecule). The conjugation can be covalent or non-covalent.

[0132] As used herein a consecutive amino acid sequence may comprise two or more polypeptides conjugated with each other directly or indirectly (for example via a linker).

[0133] In one embodiment, a first protein/polypeptide at N terminal (i.e., N′) or C terminal (i.e., C′) of a second protein/polypeptide indicates the first one is part of the second one and is located at the N′ or C′ end of the second protein/polypeptide. In another embodiment, it indicates the first protein/polypeptide is not part of the second protein/polypeptide and is conjugated to the N′ or C′ end of the second one directly or indirectly.

[0134] As used herein, a capital letter followed by a number is used to refer to an amino acid in a sequence, wherein the capital letter indicates an amino acid via the standard one-letter amino acid codes and the number provides the position of the amino acid counted from the N terminal of the sequence. For instance, S65 of SEQ ID NO:1 refers to the 65th amino acid of SEQ ID NO:1 counted from the N terminal, which is a Serine.

[0135] As used herein, the term “recombinant expression system” refers to a genetic construct or constructs for the expression of certain genetic material formed by recombination.

[0136] A “gene delivery vehicle” is defined as any molecule that can carry inserted polynucleotides into a host cell. Examples of gene delivery vehicles are liposomes, micelles biocompatible polymers, including natural polymers and synthetic polymers; lipoproteins; polypeptides; polysaccharides; lipopolysaccharides; artificial viral envelopes; metal particles; and bacteria, or viruses, such as rabies virus, flavivirus, lentivirus, baculovirus, adenovirus and retrovirus, bacteriophage, cosmid, plasmid, fungal vectors and other recombination vehicles typically used in the art which have been described for expression in a variety of eukaryotic and prokaryotic hosts, and may be used for gene therapy as well as for simple protein expression.

[0137] A polynucleotide disclosed herein can be delivered to a cell or tissue using a gene delivery vehicle. “Gene delivery,” “gene transfer” “mRNA-based delivery”, “transducing,” and the like as used herein, are terms referring to the introduction of an exogenous polynucleotide (sometimes referred to as a “transgene”) into a host cell, irrespective of the method used for the introduction. Such methods include a variety of well-known techniques such as vector-mediated gene transfer (by, e.g., viral infection/transfection, or various other protein-based or lipid-based gene delivery complexes, including for example protamine complexes, lipid nanoparticles, polymeric nanoparticles, lipid-polymer hybrid nanoparticles, and inorganic nanoparticles, or combinations thereof) as well as techniques facilitating the delivery of “naked” polynucleotides (such as electroporation, “gene gun” delivery and various other techniques used for the introduction of polynucleotides). The introduced polynucleotide can be unmodified or can comprise one or more modifications; for example, a modified mRNA may comprise ARCA capping; enzymatic polyadenylation to add a tail of 100-250 adenosine residues; and substitution of one or both of cytidine with 5-methylcytidine and/or uridine with pseudouridine. The introduced polynucleotide may be stably or transiently maintained in the host cell. Stable maintenance typically requires that the introduced polynucleotide either contains an origin of replication compatible with the host cell or integrates into a replicon of the host cell such as an extrachromosomal replicon (e.g., a plasmid) or a nuclear or mitochondrial chromosome. A number of vectors are known to be capable of mediating transfer of genes to mammalian cells, as is known in the art and described herein.

[0138] MicroRNAs (miRNAs) are small, 22-25 nucleotide non-coding sequences of RNA. These sequences control gene expression either by translational repression or degradation of the messenger RNA transcript after targeting the 3′UTR. miRNA sequences are highly conserved across all species, demonstrating the important roles that miRNAs play in cellular differentiation, proliferation and cell cycle control. It is now recognized that miRNAs are frequently de-regulated in malignancy, wherein they can be down-regulated or up-regulated. For example, under-expressed miRNAs such as let-7 in lung cancer and mirs-15/16 in leukemia, are tumor suppressor miRNAs, suppressing Ras and BCL2 respectively. In contrast, various miRNAs target the 3′ of the PTEN tumor suppressor mRNA, thereby promoting loss of functional PTEN expression (onco-miRs). Non-limiting examples of these onco-miRs include miR-106a, miR-130a, miR-181b-1, miR-21, miR-214, miR-26a-5p, miR-301a, miR-486-5p, mir-1273g-3p, miR-200b, miR-26a, miR-103, miR-106b, miR-106b-93, miR-107, miR-10b, miR-1297, miR-130, mir-130b, miR-142-5p, miR-144, miR-146b, miR-153, miR-155, miR-17, miR-17-5p, miR-181, miR-181a, miR-181c, miR-18a, miR-19, miR-19′7-3p, miR-19a, miR-19b, miR-200, miR-200a, miR-205, miR-205-5p, miR-20b, miR-218, miR-22, miR-221, miR-222, miR-224, miR-23a, miR-23b-3p, miR-25, mir-29c, miR-301a-3p, miR-32-5p, miR-335, miR-338-3p, miR-374a, miR-410-3p, miR-4299, miR-454, miR-494, miR-543, miR-548, miR-616-3p, miR-7, miR-718, miR-9, miR-92a, miR-92b, miR-93, miR-93-5p, miR-940 and miR-let 7b. Tumor suppressing miRNAs or onco-miR antagonists (antago-miRs) can be effectively delivered into a subject using aforementioned delivery methods, so as to increase the levels of the PTEN tumor suppressor. Furthermore, the levels of select onco-miRs of the above list, namelymiR-106a, miR-130a, miR-181b-1, miR-21, miR-214, miR-26a-5p, miR-301a, miR-486-5p) that circulate in the blood of a patient are prognostic for the existence of functional PTEN tumor suppressor in a subject. As non-limiting examples, Li et al 2018; PMID: 29316891 found miR-486-5p is significantly overexpressed in cervical cancer patients' serum and tissues as compared to control patients, whereas miR-486-5p directly targets the 3′-untranslated region of the tumor-suppressor gene PTEN, inhibiting its expression, and that overexpression of miR-486-5p activates the PI3K/Akt pathway. In another example, the serum/plasma levels of miR-21 were found to be inversely correlated with and fully prognostic of PTEN protein levels in a variety of cancers (including gastric, colorectal, triple negative breast cancer etc.), in the context of both xenografted mouse tumors and human cancer patients (reviewed in Feng & Tsao, 2016; PMID: 27699004). Hence, onco-miR blood levels, such as miR-21 plasma levels in a subject can serve as a liquid biopsy, which is generally defined as an assay analyzing proteins, DNA, or cancer cells that circulate in the blood of a subject.

[0139] A “plasmid” is an extra-chromosomal DNA molecule separate from the chromosomal DNA which is capable of replicating independently of the chromosomal DNA. In many cases, it is circular and double-stranded. Plasmids provide a mechanism for horizontal gene transfer within a population of microbes and typically provide a selective advantage under a given environmental state. Plasmids may carry genes that provide resistance to naturally occurring antibiotics in a competitive environmental niche, or alternatively the proteins produced may act as toxins under similar circumstances.

[0140] “Plasmids” used in genetic engineering are called “plasmid vectors”. Many plasmids are commercially available for such uses. The gene to be replicated is inserted into copies of a plasmid containing genes that make cells resistant to particular antibiotics and a multiple cloning site (MCS, or polylinker), which is a short region containing several commonly used restriction sites allowing the easy insertion of DNA fragments at this location. Another major use of plasmids is to make large amounts of proteins. In this case, researchers grow bacteria containing a plasmid harboring the gene of interest. Just as the bacterium produces proteins to confer its antibiotic resistance, it can also be induced to produce large amounts of proteins from the inserted gene.

[0141] A “yeast artificial chromosome” or “YAC” refers to a vector used to clone large DNA fragments (larger than 100 kb and up to 3000 kb). It is an artificially constructed chromosome and contains the telomeric, centromeric, and replication origin sequences needed for replication and preservation in yeast cells. Built using an initial circular plasmid, they are linearized by using restriction enzymes, and then DNA ligase can add a sequence or gene of interest within the linear molecule by the use of cohesive ends. Yeast expression vectors, such as YACs, YIps (yeast integrating plasmid), and YEps (yeast episomal plasmid), are extremely useful as one can get eukaryotic protein products with posttranslational modifications as yeasts are themselves eukaryotic cells, however YACs have been found to be more unstable than BACs, producing chimeric effects.

[0142] A “viral vector” is defined as a recombinantly produced virus or viral particle that comprises a polynucleotide to be delivered into a host cell, either in vivo, ex vivo or in vitro.

[0143] Examples of viral vectors include retroviral vectors, adenovirus vectors, adeno-associated virus vectors, herpes simplex virus vectors, alphavirus vectors and the like.

[0144] Research on developing novel viral vectors is advancing steadily with a special focus on substituting pathogenic genes with therapeutic DNA. In fact, non-pathogenic, replication-defective, and human friendly viral vectors are being used in more than 70% of the ongoing gene therapy clinical trials worldwide. One particularly popular use of viral vectors, such as adenovirus, Seneca Valley virus, poliovirus, vaccinia virus, herpes simplex virus, reovirus, Coxsackievirus, parvovirus, Newcastle disease virus, vesicular stomatitis virus, and measles virus, is in the form of oncolytic viruses (OV). In 2016 alone, more than 40 clinical trials using OV were conducted. OV destroy malignant cancer cells by specifically replicating in those cells to effectively lyse them as well as induce a robust antitumor immune response. OV selectively replicate in tumor cells through a variety of methods such as virus-specific receptors on the cells. They can be used to deliver anti-angiogenesis genes, suicide genes, immunostimulatory genes, and DNA encoding small nucleic acids. Apart from carrying immunostimulatory genes, OV can induce an immune response by releasing cell debris and viral antigens (Goswami et al, 2019; PMID: 31069169).

[0145] Infectious tobacco mosaic virus (TMV)-based vectors can be used to manufacturer proteins and have been reported to express Griffithsin in tobacco leaves (O'Keefe et al. (2009) Proc. Nat. Acad. Sci. USA 106(15):6099-6104). Alphavirus vectors, such as Semliki Forest virus-based vectors and Sindbis virus-based vectors, have also been developed for use in gene therapy and immunotherapy. See, Schlesinger &Dubensky (1999) Curr. Opin. Biotechnol. 5:434-439 and Ying et al. (1999) Nat. Med. 5(7):823-827. In aspects where gene transfer is mediated by a retroviral vector, a vector construct refers to the polynucleotide comprising the retroviral genome or part thereof, and a therapeutic gene. Further details as to modern methods of vectors for use in gene transfer may be found in, for example, Kotterman et al. (2015) Viral Vectors for Gene Therapy: Translational and Clinical Outlook Annual Review of Biomedical Engineering 17.

[0146] As used herein, “retroviral mediated gene transfer” or “retroviral transduction” carries the same meaning and refers to the process by which a gene or nucleic acid sequences are stably transferred into the host cell by virtue of the virus entering the cell and integrating its genome into the host cell genome. The virus can enter the host cell via its normal mechanism of infection or be modified such that it binds to a different host cell surface receptor or ligand to enter the cell. As used herein, retroviral vector refers to a viral particle capable of introducing exogenous nucleic acid into a cell through a viral or viral-like entry mechanism.

[0147] Retroviruses carry their genetic information in the form of RNA; however, once the virus infects a cell, the RNA is reverse-transcribed into the DNA form which integrates into the genomic DNA of the infected cell. The integrated DNA form is called a provirus.

[0148] Adenoviruses (AdVs) are a relatively well characterized, homogenous group of viruses, including over 50 serotypes. The seroprevalence of the most commonly used Ad serotype, serotype 5, is approximately 50% in North America and reaches nearly 100% is some regions of Africa, while the seroprevalences of Ad3 and Ad35 in the US are around 100% and 3%-22%, respectively. AdVs do not require integration into the host cell genome. Recombinant Ad derived vectors, particularly those that reduce the potential for recombination and generation of wild-type virus, have also been constructed.

[0149] DNA viral vectors, such as an adenovirus (AdV), herpes simplex virus (HSV) or adeno-associated virus (AAV), comprising a viral genome or a fragment thereof, and a polynucleotide encoding a protein of interest (which is also referred to herein as a transgene) are commercially available from sources such as Takara Bio USA (Mountain View, CA), Vector Biolabs (Philadelphia, PA), and Creative Biogene (Shirley, NY). Wild-type AAV has high infectivity and specificity integrating into the host cell's genome. See, Wold and Toth (2013) Curr. Gene. Ther. 13(6):421-433, Hermonat&Muzyczka (1984) Proc. Natl. Acad. Sci. USA 81:6466-6470, and Lebkowski et al. (1988) Mol. Cell. Biol. 8:3988-3996.

[0150] Vectors that contain both a promoter and a cloning site into which a polynucleotide can be operatively linked are well known in the art. Such vectors are capable of transcribing RNA in vitro or in vivo, and are commercially available from sources such as Agilent Technologies (Santa Clara, Calif.) and Promega Biotech (Madison, Wis.). In order to optimize expression and/or in vitro transcription, it may be necessary to remove, add or alter 5′ and/or 3′ untranslated portions of the clones to eliminate extra, potential inappropriate alternative translation initiation codons or other sequences that may interfere with or reduce expression, either at the level of transcription or translation. Alternatively, consensus ribosome binding sites can be inserted immediately 5′ of the start codon to enhance expression.

[0151] Gene delivery vehicles also include DNA/liposome complexes, micelles and targeted viral protein-DNA complexes. Liposomes that also comprise a targeting antibody or fragment thereof can be used in the methods disclosed herein. In addition to the delivery of polynucleotides to a cell or cell population, direct introduction of the proteins described herein to the cell or cell population can be done by the non-limiting technique of protein transfection, alternatively culturing conditions that can enhance the expression and/or promote the activity of the proteins disclosed herein are other non-limiting techniques.

[0152] As used herein, the term “viral capsid” or “capsid” refers to the proteinaceous shell or coat of a viral particle. Capsids function to encapsidate, protect, transport, and release into host cell a viral genome. Capsids are generally comprised of oligomeric structural subunits of protein (“capsid proteins”). As used herein, the term “encapsidated” means enclosed within a viral capsid.

[0153] As used herein, the term “helper” in reference to a virus or plasmid refers to a virus or plasmid used to provide the additional components necessary for replication and packaging of a viral particle or recombinant viral particle, such as the modified AAV disclosed herein. The components encoded by a helper virus may include any genes required for virion assembly, encapsidation, genome replication, and/or packaging. For example, the helper virus may encode necessary enzymes for the replication of the viral genome. Non-limiting examples of helper viruses and plasmids suitable for use with AAV constructs include pHELP (plasmid), adenovirus (virus), or herpesvirus (virus).

[0154] As used herein, the term “AAV” is a standard abbreviation for adeno-associated virus. Adeno-associated virus is a single-stranded DNA parvovirus that grows only in cells in which certain functions are provided by a co-infecting helper virus. General information and reviews of AAV can be found in, for example, Carter, 1989, Handbook of Parvoviruses, Vol. 1, pp. 169-228, and Berns, 1990, Virology, pp. 1743-1764, Raven Press, (New York). It is fully expected that the same principles described in these reviews are applicable to additional AAV serotypes characterized after the publication dates of the reviews because it is well known that the various serotypes are quite closely related, both structurally and functionally, even at the genetic level (see, for example, Blacklowe, 1988, pp. 165-174 of Parvoviruses and Human Disease, J. R. Pattison, ed.; and Rose, Comprehensive Virology 3: 1-61 (1974)). For example, all AAV serotypes apparently exhibit very similar replication properties mediated by homologous rep genes; and all bear three related capsid proteins such as those expressed in AAV2. The degree of relatedness is further suggested by heteroduplex analysis which reveals extensive cross-hybridization between serotypes along the length of the genome; and the presence of analogous self-annealing segments at the termini that correspond to “inverted terminal repeat sequences” (ITRs). The similar infectivity patterns also suggest that the replication functions in each serotype are under similar regulatory control.

[0155] An “AAV vector” as used herein refers to a vector comprising one or more polynucleotides of interest (or transgenes) that are flanked by AAV terminal repeat sequences (ITRs). Such AAV vectors can be replicated and packaged into infectious viral particles when present in a host cell that has been transfected with a vector encoding and expressing rep and cap gene products.

[0156] An “AAV virion” or “AAV viral particle” or “AAV vector particle” refers to a viral particle composed of at least one AAV capsid protein and an encapsidated polynucleotide AAV vector. If the particle comprises a heterologous polynucleotide (i.e., a polynucleotide other than a wild-type AAV genome such as a transgene to be delivered to a mammalian cell), it is typically referred to as an “AAV vector particle” or simply an “AAV vector”. Thus, production of AAV vector particle necessarily includes production of AAV vector, as such a vector is contained within an AAV vector particle.

[0157] Adeno-associated virus (AAV) is a replication-deficient parvovirus, the single-stranded DNA genome of which is about 4.7 kb in length including two 145 nucleotide inverted terminal repeat (ITRs). There are multiple serotypes of AAV. The nucleotide sequences of the genomes of the AAV serotypes are known. For example, the complete genome of AAV-1 is provided in GenBank Accession No. NC_002077; the complete genome of AAV-2 is provided in GenBank Accession No. NC_001401 and Srivastava et al., J. Virol., 45: 555-564 (1983); the complete genome of AAV-3 is provided in GenBank Accession No. NC_1829; the complete genome of AAV-4 is provided in GenBank Accession No. NC_001829; the AAV-5 genome is provided in GenBank Accession No. AF085716; the complete genome of AAV-6 is provided in GenBank Accession No. NC_00 1862; at least portions of AAV-7 and AAV-8 genomes are provided in GenBank Accession Nos. AX753246 and AX753249, respectively; the AAV-9 genome is provided in Gao et al., J. Virol., 78: 6381-6388 (2004); the AAV-10 genome is provided in Mol. Ther., 13(1): 67-76 (2006); and the AAV-11 genome is provided in Virology, 330(2): 375-383 (2004). The sequence of the AAV rh.74 genome is provided in U.S. Pat. No. 9,434,928, incorporated herein by reference. Cis-acting sequences directing viral DNA replication (rep), encapsidation/packaging and host cell chromosome integration are contained within the AAV ITRs. Three AAV promoters (named p5, p19, and p40 for their relative map locations) drive the expression of the two AAV internal open reading frames encoding rep and cap genes. The two rep promoters (p5 and pi 9), coupled with the differential splicing of the single AAV intron (at nucleotides 2107 and 2227), result in the production of four rep proteins (rep 78, rep 68, rep 52, and rep 40) from the rep gene. Rep proteins possess multiple enzymatic properties that are ultimately responsible for replicating the viral genome. The cap gene is expressed from the p40 promoter and it encodes the three capsid proteins VP1, VP2, and VP3. Alternative splicing and non-consensus translational start sites are responsible for the production of the three related capsid proteins. A single consensus polyadenylation site is located at map position 95 of the AAV genome. The life cycle and genetics of AAV are reviewed in Muzyczka, Current Topics in Microbiology and Immunology, 158: 97-129 (1992).

[0158] AAV possesses unique features that make it attractive as a vector for delivering foreign DNA to cells, for example, in gene therapy. AAV infection of cells in culture is noncytopathic, and natural infection of humans and other animals is silent and asymptomatic. Moreover, AAV infects many mammalian cells allowing the possibility of targeting many different tissues in vivo. Moreover, AAV transduces slowly dividing and non-dividing cells, and can persist essentially for the lifetime of those cells as a transcriptionally active nuclear episome (extrachromosomal element). The AAV proviral genome is inserted as cloned DNA in plasmids, which makes construction of recombinant genomes feasible. Furthermore, because the signals directing AAV replication and genome encapsidation are contained within the ITRs of the AAV genome, some or all of the internal approximately 4.3 kb of the genome (encoding replication and structural capsid proteins, rep-cap) may be replaced with foreign DNA. To generate AAV vectors, the rep and cap proteins may be provided in trans. Another significant feature of AAV is that it is an extremely stable and hearty virus. It easily withstands the conditions used to inactivate adenovirus (56° to 65° C. for several hours), making cold preservation of AAV less critical. AAV may even be lyophilized. Finally, AAV-infected cells are not resistant to superinfection.

[0159] Multiple studies have demonstrated long-term (>1.5 years) recombinant AAV-mediated protein expression in muscle. See, Clark et al., Hum Gene Ther, 8: 659-669 (1997); Kessler et al., Proc Nat. Acad Sc. USA, 93: 14082-14087 (1996); and Xiao et al., J Virol, 70: 8098-8108 (1996). See also, Chao et al., Mol Ther, 2:619-623 (2000) and Chao et al., Mol Ther, 4:217-222 (2001). Moreover, because muscle is highly vascularized, recombinant AAV transduction has resulted in the appearance of transgene products in the systemic circulation following intramuscular injection as described in Herzog et al., Proc Natl Acad Sci USA, 94: 5804-5809 (1997) and Murphy et al., Proc Natl Acad Sci USA, 94: 13921-13926 (1997). Moreover, Lewis et al., J Virol, 76: 8769-8775 (2002) demonstrated that skeletal myofibers possess the necessary cellular factors for correct antibody glycosylation, folding, and secretion, indicating that muscle is capable of stable expression of secreted protein therapeutics. AAV DNA in the rAAV genomes may be from any AAV serotype for which a recombinant virus can be derived including, but not limited to, AAV serotypes AAV-1, AAV-2, AAV-3, AAV-4, AAV-5, AAV-6, AAV-7, AAV-8, AAV-9, AAV-10, AAV-11, AAV-12, AAV-13 and AAV rh74. Production of pseudotyped rAAV is disclosed in, for example, WO 01/83692. Other types of rAAV variants, for example rAAV with capsid mutations, are also contemplated. See, for example, Marsic et al., Molecular Therapy, 22(11): 1900-1909 (2014). The nucleotide sequences of the genomes of various AAV serotypes are known in the art.

[0160] Herpes Simplex Viruses (“HSVs”) are believed to have tremendous potential as a preventative and therapeutic vaccine against cancer and other diseases because of their ability to evade the immune system and circulating anti-viral drugs, deliver multiple genes, infect a wide variety of cells, pose low risk of adverse health effects, and multiply specifically in tumor cells. They are large enveloped viruses that carry a linear dsDNA of 120-240 kb and infect reptiles, birds, fish, amphibians, and mammals. There are eight known human herpesviruses: herpes simplex virus-1 (HSV-1), herpes simplex virus-2 (HSV-2), human cytomegalovirus (HCMV), varicella-zoster virus (VZV), Epstein-Barr virus (EBV), Kaposi's sarcoma-associated herpesvirus (KSHV), and human herpesviruses 6 and 7 grouped under alpha, beta, and gamma genera. HSV vectors are generally constructed by homologous recombination in eukaryotic cells by co-transfecting the viral genome and a plasmid carrying the therapeutic gene flanked by the sequences homologous to the target locus on viral genome to undergo recombination. The replication-incompetent vectors are created by either mutating or deleting several immediate early genes including ICP4 and ICP27 that are essential for replication and, therefore, can grow only in specifically designed cell lines complemented transiently. For example, Vero-7b cell line is capable of providing in trans the proteins encoded by deleted viral genes. They are safe and non-inflammatory advanced vector platforms known to persist and express in the nerve cells for life and therefore used to treat neuropathic, inflammatory, and cancer-associated pain. The helper-dependent HSV vectors, or amplicon vectors, carry deletions in one or more non-essential genes and retain the ability to replicate in vitro but are compromised in vivo in a context-dependent manner. These viruses are the same as wild type HSV, with plasmids containing a packaging signal and the gene of interest. Amplicons have the ability to accommodate a very large therapeutic sequence up to 100 kb in size but have production and stability issues. The replication-incompetent vectors and amplicons have been used to express genes in the nervous system, muscle, heart, and liver.

[0161] An oncolytic HSV-1 carrying PTEN-L has been successfully used to treat brain cancer (Russell et al, 2018; PMID: 30479334), whereas additional examples including the FDA-approved T-Vec HSV drug are reviewed in Goswami et al, 2019 (PMID: 31069169).

[0162] In one embodiment, provided is a HSV vector comprising a HSV viral genome or a fragment thereof and a polynucleotide encoding a fusion protein. In a further embodiment, the HSV vector is generated from the HSV-1 strain 17 [152, 222 bp; NCBI Reference Sequence: NC_001806.2; ncbi.nlm.nih.gov/nuccore/820945227; National (UK) Collection of Pathogenic Viruses, catalog #0104151v]. Methods of creating such a HSV vector from a known HSV vector (such as HSV-1 strain 17) can be found in the Examples. In yet a further embodiment, the HSV vector is an oncolytic HSV (oHSV) one lacking one or both ICP47 and ICP34.5 virulent HSV genes, as described herein, (e.g. oHSV1-ΔICP34.5/ΔICP47; SEQ ID NO:242). In one embodiment, one or more of the ICP34.5 gene is replaced with a polynucleotide encoding a fusion protein. In a further embodiment, the polynucleotide further comprises regulatory sequences which direct the fusion protein's expression. Optionally, the regulatory sequences comprises a CMV promoter and/or a CMV5 promoter. Additionally or alternatively, the polynucleotide comprises an albumin-PTEN fusion cDNAs disclosed herein, such as one or more of SEQ ID NO:54-70, 74-77, or 135-160. In one embodiment, the polynucleotide comprises the cDNA of SEQ ID NO:68 or an equivalent thereof and expresses the PR402 protein with SEQ ID NO:28. In another embodiment, the polynucleotide comprises the cDNA of SEQ ID NO:59 or an equivalent thereof and expresses the PR61 protein with SEQ ID NO:19. In another embodiment, the polynucleotide comprises the cDNA of SEQ ID NO:59 or an equivalent thereof and expresses the tagless PR61 protein with SEQ ID NO:227. In yet another embodiment, the polynucleotide comprises the cDNA of SEQ ID NO:65 or an equivalent thereof and expresses the PR33 protein with SEQ ID NO:25. In one embodiment, the polynucleotide comprises the cDNA of SEQ ID NO:136 or an equivalent thereof and expresses the PR34 protein with SEQ ID NO:50. In one embodiment, the HSV vector is an oncolytic HSV-1/17/Δ47/Δ34.5-PRn as illustrated in FIG. 6D which lacks ICP47 and replaces ICP34.5 gene(s) with a polynucleotide encoding a fusion protein under the regulation of a CMV promoter. Further provided is a host cell infected with an HSV as disclosed herein for producing the HSV and/or expressing a fusion protein. In one embodiment, the host cell is a permissive cell, which is a cell that allows a virus circumvent its defenses and replicate. Additionally or alternatively, the host cell comprises receptors mediating HSV entry, including but not limited to nectin-1, herpes virus entry mediator (HVEM) or 3-O-sulfated heparan sulfate. In a further embodiment, the host cell is selected from the group of 4T1, MDAMB468, or PC3 cells. In one embodiment, the polynucleotide encodes a fusion protein having an amino acid sequence selected from SEQ ID NO: 14-30, 34-37, 49-50 and 109-132. In another embodiment, the recombinant oncolytic HSV is constructed using CRISPR or TALEN methodology. In one embodiment, the virus is HSV-1. In another embodiment the HSV virus is HSV-2. In another embodiment, the polynucleotide encoding a fusion protein comprises a polypeptide encoding an N-terminal signal peptide, optionally selected of [nt (1-63) of SEQ ID NO: 171 or SEQ ID NO: 180-192]. In another embodiment, the fusion protein lacks a signal peptide but comprises an initiator methionine residue (optionally encoded by an ATG codon) at the N-terminal of either albumin or PTEN, respectively, as appropriate. In another embodiment, the fusion protein lacks signal peptide but comprises an initiator methionine (optionally encoded by an ATG codon) replacing the first residue of albumin (for example, mature albumin, optionally via replacing the first three nucleotides of the albumin coding polynucleotide with ATG, and further optionally the albumin coding polypeptide is selected from SEQ ID NO:176-179) or of PTEN [for example, a mature PTEN-L, optionally via replacing the first three nucleotides of the PTEN coding polynucleotide with ATG, and further optionally the PTEN coding polynucleotide comprises a sequence selected from SEQ ID NO:167 or nucleotide (nt) 64-nt 1728 of SEQ ID NO:171], as appropriate. In another embodiment, the recombinant oncolytic HSV virus carries/comprises one albumin-PTEN fusion cDNA selected of SEQ ID NO:54-70, 74-77, 135-160. In another embodiment the virus carries/comprises two or more albumin-PTEN fusion cDNAs selected of SEQ ID NO:54-70, 74-77 or 135-160. In another embodiment, the recombinant oncolytic HSV virus or another other vector as disclosed herein further comprises a polynucleotide encoding a fusion protein. In a further embodiment, the polynucleotide is selected from SEQ ID NO:54-70, 74-77, or 135-160. Additionally or alternatively, the recombinant oncolytic HSV virus or any other vector as disclosed herein comprises a polynucleotide encoding a further fusion protein which comprises an amino acid sequence of an albumin and an amino acid sequence of a p53 protein. As used herein, the fusion protein comprising the amino acid sequences of albumin and p53 protein is referred to herein as an albumin-p53 protein. In a further embodiment, the polynucleotide encoding an albumin-p53 protein is selected from SEQ ID NO:78 or 161. In certain embodiments, the recombinant viral vector and/or any vector as described herein further comprises a polynucleotide encoding all or a portion of a heterologous protein or polypeptide.

[0163] In one embodiment, the heterologous protein is heterologous to the viral vector. In a further embodiment, the heterologous protein is heterologous to the fusion protein, such as heterologous to human if the PTEN and/or albumin is a human one. In yet a further embodiment, the heterologous protein is a non-naturally occurring protein. In one embodiment, the heterologous protein comprises, or consists essentially of, or yet further consists of a PTEN or a fragment, analogue, variant, mutant, isoform or equivalent thereof. In one embodiment, the heterologous protein further comprises a signal peptide and/or a a detectable or purification marker. In one embodiment, the heterologous protein lacks an amino acid sequence of albumin. In a further embodiment, the heterologous protein comprises, or consists essentially of, or yet further consists of a PTEN-L or a fragment, analogue, variant, mutant, isoform or equivalent thereof. In yet a further embodiment, the heterologous protein comprises an amino acid sequence selected from SEQ ID NOs: 31 to 33 or a fragment, analogue, variant, mutant, isoform or equivalent of each. In one embodiment, the heterologous protein is encoded by a polynucleotide comprising a sequence selected from SEQ ID NOs: 71-73, 171-72, 166-167, 198-200, 204-206, a fragment thereof, or a polynucleotide at least 90% identical to SEQ ID NOs: 71-73, 171-72, 166-167, 198-200, 204-206 and encoding the same amino acid sequence as by SEQ ID NOs: 71-73, 171-72, 166-167, 198-200, 204-206, respectively. In another embodiment, the heterologous protein can be used in treating a cancer, such as an antibody or a fragment thereof. In a further embodiment, the heterologous protein is a monoclonal antibody (mAb) or an equivalent thereof, including but not limited to: a mAb or an equivalent thereof recognizing and binding to VEGFR (such as Avastin™), or a mAb or an equivalent thereof recognizing and binding to HER2 (such as Herceptin™), or a mAb or an equivalent thereof recognizing and binding to EGFR (such as Erbitux™) or a mAb or an equivalent thereof that regulates immune checkpoints (also broadly known as “checkpoint antibody”), such as one recognizing and binding to CTLA4 [for example Yervoy™ (ipilimumab)], or one recognizing and binding to PD-1 [for example Keytruda™ (pembrolizumab) and Opdivo™ (nivolumab)], or one recognizing and binding to PD-L1 (for example, Tecentriq™ (atezolizumab)]. In another embodiment, the heterologous protein is selected from the group of Granulocyte-macrophage colony-stimulating factor (GM-CSF) or an equivalent thereof, an interleukin such as IL-2 or IL-15, or an interferon such IFβ or IFNγ; or a natural bioactive peptide, such as thymosin A or adiponectin, or a synthetic peptide such as hexarelin.

[0164] Hydrodynamic delivery has emerged as the simplest and most effective method for intracellular delivery of membrane impermeable substances in rodents. The system employs a physical force generated by a rapid injection of large volume of solution into a blood vessel to enhance the permeability of endothelium and the plasma membrane of the parenchyma cells to allow delivery of substance into cells. The procedure was initially established for gene delivery in mice and its applications have been extended to the delivery of proteins, oligo nucleotides, genomic DNA and RNA sequences, and small molecules. The advantage for the use of hydrodynamic gene delivery to study therapeutic functions of a gene is obvious. A candidate gene in plasmid or DNA fragment with regulatory sequence for its expression can be hydrodynamically injected into an animal (mouse or rat) carrying a target disease. The therapeutic effect of the gene product (protein or RNA) on disease progression or regression is then evaluated with time. Similar to a conventional drug study, repeated gene transfer, different amount of DNA, and different regiment can be used to maximize the therapeutic outcome. Compared to conventional biotech approach that relies on purified protein for therapeutic assessment, hydrodynamics-based protocol makes the liver as the manufacture site for therapeutic proteins, eliminating the steps and cost for protein production and characterization. In addition, since therapeutic evaluation is directly conducted in animals, no issues about formulation development and bioavailability need to be addressed. Examples of hydrodynamic gene delivery to treat disease include intra-arterial delivery of endostatin gene to brain tumors to prolong animal survival; high volume hydrodynamic injection of plasmid DNA via the hepatic artery leading to a high level of gene expression in rat hepatocellular carcinoma induced by diethylnitrosamine; therapeutic effects of intravenous interferon gene delivery with naked plasmid DNA in murine metastasis models and others (reviewed in Bonamassa et al, 2011; PMID: 21191634).

[0165] As used herein, the term “animal” refers to living multi-cellular vertebrate organisms, a category that includes, for example, mammals and birds. The term “mammal” includes both human and non-human mammals.

[0166] The terms “subject,” “host,” “individual,” and “patient” are as used interchangeably herein to refer to human and veterinary subjects, for example, humans, animals, non-human primates, dogs, cats, sheep, mice, horses, and cows. In some embodiments, the subject is a human.

[0167] In one aspect, a “subject” or “patient” to whom the present combination of oncolytic viral vectors expressing albumin-PTEN fusions and immune checkpoint inhibitor is administered is preferably a mammal such as a non-primate (e.g., cow, pig, horse, cat, dog, rat, etc.) or a primate (e.g., monkey or human). The subject or patient can be a human, such as an adult patient or a pediatric patient.

[0168] An “effective amount” or “efficacious amount” refers to the amount of an agent, or combined amounts of two or more agents, that, when administered for the treatment of a mammal or other subject, is sufficient to effect such treatment for the disease. The “effective amount” will vary depending on the agent(s), the disease and its severity and the age, weight, etc., of the subject to be treated.

[0169] As used herein, a biological sample, or a sample, can be obtained from a subject, cell line or cultured cell or tissue. Exemplary samples include, but are not limited to, cell sample, tissue sample, tumor biopsy, liquid samples such as blood and other liquid samples of biological origin (including, but not limited to, ocular fluids (aqueous and vitreous humor), peripheral blood, sera, plasma, ascites, urine, cerebrospinal fluid (CSF), sputum, saliva, bone marrow, synovial fluid, aqueous humor, amniotic fluid, cerumen, breast milk, broncheoalveolar lavage fluid, semen, prostatic fluid, cowper's fluid or pre-ejaculatory fluid, female ejaculate, sweat, tears, cyst fluid, pleural and peritoneal fluid, pericardial fluid, ascites, lymph, chyme, chyle, bile, interstitial fluid, menses, pus, sebum, vomit, vaginal secretions/flushing, synovial fluid, mucosal secretion, stool water, pancreatic juice, lavage fluids from sinus cavities, bronchopulmonary aspirates, blastocyl cavity fluid, or umbilical cord blood. In some instances, the sample is a tumor/cancer biopsy.

[0170] A “solid tumor” is an abnormal mass of tissue that usually does not contain cysts or liquid areas. Solid tumors can be benign or malignant. Different types of solid tumors are named for the type of cells that form them. Examples of solid tumors include sarcomas, carcinomas, and lymphomas. The solid tumor can be localized or metastatic.

[0171] As used herein, the term “extracellular matrix” (ECM) is a three-dimensional network of extracellular macromolecules, such as collagen, enzymes, and glycoproteins, that provide structural and biochemical support to surrounding cells. It is an essential component of the tumor microenvironment. Cancer development and progression are associated with increased ECM deposition and crosslink, while the chemical and physical signals elicited from ECM are necessary for cancer cell proliferation and invasion. In one embodiment, the ECM of a cancer comprises a peri-cancerous cell or tissue.

[0172] The pi3K pathway is an intracellular signal transduction pathway that promotes metabolism, proliferation, cell survival, growth and angiogenesis in response to extracellular signals. This is mediated through serine and/or threonine phosphorylation of a range of downstream substrates. Key proteins involved are phosphatidylinositol 3-kinase (PI3K) and Akt/Protein Kinase B. PTEN is a main down regulation protein which can convert PIP3 into PIP2. Addition to these regulation protein, the pathway itself also have feedback mechanisms: Transcription factor NF-κB, activated by Akt, regulates peroxisome proliferator-activated receptor delta (PPARβ/δ) agonists and tumor necrosis factor α (TNFα), which in turn repress PTEN expression as a positive feedback; Negative feedback loop is functioned by mTORC1 and S6K1 activation. S6K1 is able to phosphorylate IRS-1 at multiple serine residues, preventing binding to RTKs, resulting the suppression of PI3K activation.

[0173] As used herein, the term “detectable marker” refers to at least one marker capable of directly or indirectly, producing a detectable signal. A non-exhaustive list of this marker includes enzymes which produce a detectable signal, for example by colorimetry, fluorescence, luminescence, such as horseradish peroxidase, alkaline phosphatase, 8-galactosidase, glucose6-phosphate dehydrogenase, chromophores such as fluorescent, luminescent dyes, groups with electron density detected by electron microscopy or by their electrical property such as conductivity, amperometry, voltammetry, impedance, detectable groups, for example whose molecules are of sufficient size to induce detectable modifications in their physical and/or chemical properties, such detection may be accomplished by optical methods such as diffraction, surface plasmon resonance, surface variation, the contact angle change or physical methods such as atomic force spectroscopy, tunnel effect, or radioactive molecules such as ³²P, ³⁵S, ⁸⁹Zr or ¹²⁵I.

[0174] As used herein, the term “purification marker” refers to at least one marker useful for purification or identification. A non-exhaustive list of this marker includes His, lacZ, GST, maltose-binding protein, NusA, BCCP, c-myc, CaM, FLAG, GFP, YFP, cherry, thioredoxin, poly(NANP), V5, Snap, HA, chitin-binding protein, Softag 1, Softag 3, Strep, or S-protein. Suitable direct or indirect fluorescence marker comprise FLAG, GFP, YFP, RFP, dTomato, cherry, Cy3, Cy 5, Cy 5.5, Cy 7, DNP, AMCA, Biotin, Digoxigenin, Tamra, Texas Red, rhodamine, Alexa fluors, FITC, TRITC or any other fluorescent dye or hapten.

[0175] As used herein, an epitope tag is a biological structure or sequence, such as a protein or carbohydrate, which acts as an antigen that is recognized by an antibody. In certain embodiments, an epitope tag is used interchangeably with a purification marker and/or an affinity tag.

[0176] As used herein, “optical imaging” refers to imaging of a signal where at least some of the signal from the region of interest is in the form of an electromagnetic radiation in the visible light range. Non-limiting examples of optical imaging include detection of fluorescence and luminescence signals. Such signals can be captured by optical devices, such as a camera.

[0177] As used herein, “non-optical imaging” refers to imaging of a signal where at least some of the signal from the region of interest is in the form of electromagnetic radiation outside the visible range, and can include particles, and other propagations of energy. Non-limiting examples of non-optical imaging include detection of gamma rays (e.g., SPECT), X-rays, RF signals (e.g., MRI), particles such as electrons or positrons (e.g., PET), and other forms of energy propagations (e.g., ultrasound).

[0178] As used herein, “immunophenotyping” refers to the analysis of heterogeneous populations of cells for the purpose of identifying the presence and proportions of the various populations in the sample. Antibodies are used to identify cells by detecting specific antigens (termed markers) expressed by these cells. In an aspect, the cell samples are characterized by immunophenotyping using techniques such as flow cytometry. In alternative aspects, characterizations of the various cell types, (such as T cells, B cells and their subsets) present in a cell sample may be carried out using any suitable methodology such as reverse transcriptase polymerase chain reaction (RT-PCR) or immunocytochemistry (IHC). In an aspect, the populations of cells or cell types present in the cell sample are identified based on the presence or absence of one or more cell surface markers selected from CD45, CD3, CD4, CD8, FoxP3, CD25, Pd-1, CD69 (lag3/ICOS/CTLA4), Ki-67, CD49b/CD335, CD19, CD11b, Ly-6G, Ly-6C, CD11c, CD24, F4/80, MHC II, CD206, CD44, CD62L, CD103, XCR1, CD80, CD86, Siglec-H (15), CD115, PD-L1.

[0179] The phrase “first line” or “second line” or “third line” refers to the order of treatment received by a patient. First line therapy regimens are treatments given first, whereas second or third line therapy are given after the first line therapy or after the second line therapy, respectively. The National Cancer Institute defines first line therapy as “the first treatment for a disease or condition. In patients with cancer, primary treatment can be surgery, chemotherapy, radiation therapy, or a combination of these therapies. First line therapy is also referred to those skilled in the art as “primary therapy and primary treatment”. Typically, a patient is given a subsequent chemotherapy regimen because the patient did not show a positive clinical or sub-clinical response to the first line therapy or the first line therapy has stopped.

[0180] It is to be inferred without explicit recitation and unless otherwise intended, that when the present disclosure relates to a polypeptide, protein, polynucleotide or antibody, an equivalent or a biologically equivalent of such is intended within the scope of this disclosure. As used herein, the term “biological equivalent thereof” is intended to be synonymous with “equivalent thereof” when referring to a reference protein, antibody, polypeptide or nucleic acid, intends those having minimal sequence identity while still maintaining desired structure or functionality. Unless specifically recited herein, it is contemplated that any polynucleotide, polypeptide or protein mentioned herein also includes equivalents thereof. For example, an equivalent intends at least about 70% homology or identity, or at least 80% homology or identity and alternatively, or at least about 85%, or alternatively at least about 90%, or alternatively at least about 95%, or alternatively 98% percent homology or identity across the length of the reference sequence and exhibits substantially equivalent biological activity to the reference protein, polypeptide or nucleic acid. Alternatively, when referring to polynucleotides, an equivalent thereof is a polynucleotide that hybridizes under stringent conditions to the reference polynucleotide or its complement.

[0181] A “composition” is intended to mean a combination of active polypeptide, polynucleotide or antibody and another compound or composition, inert (e.g., a detectable label) or active (e.g., a gene delivery vehicle).

[0182] A “pharmaceutical composition” is intended to include the combination of an active polypeptide, polynucleotide or antibody with a carrier, inert or active such as a solid support, making the composition suitable for diagnostic or therapeutic use in vitro, in vivo or ex vivo.

[0183] As used herein, the term “pharmaceutically acceptable carrier” encompasses any of the standard pharmaceutical carriers, such as a phosphate buffered saline solution, water, and emulsions, such as an oil/water or water/oil emulsion, and various types of wetting agents. The compositions also can include stabilizers and preservatives. For examples of carriers, stabilizers and adjuvants, see Martin (1975) Remington's Pharm. Sci., 15th Ed. (Mack Publ. Co., Easton).

[0184] “Simultaneous use” as used herein refers to the administration of the two compounds of the composition according to the invention in a single and identical pharmaceutical form or at the same time in two distinct pharmaceutical forms.

[0185] “Separate use” as used herein refers to the administration, at the same time, of the two compounds of the composition according to the invention in distinct pharmaceutical forms.

[0186] “Sequential use” as used herein refers to the successive administration of the two compounds of the composition according to the invention, each in a distinct pharmaceutical form. A “subject” of diagnosis or treatment is a cell or an animal such as a mammal, or a human. A subject is not limited to a specific species and includes non-human animals subject to diagnosis or treatment and are those subject to infections or animal models, for example, simians, murines, such as, rats, mice, chinchilla, canine, such as dogs, leporids, such as rabbits, livestock, sport animals, and pets. Human patients are included within the term as well.

[0187] A “therapeutic agent” encompasses biological agents, such as an antibody, a peptide, a protein, an enzyme, and chemotherapeutic agents. The therapeutic agent also encompasses immuno-conjugates of cell-binding agents (CBAs) and chemical compounds, such as antibody-drug conjugates (ADCs). The drug in the conjugates can be a cytotoxic agent, such as one described herein.

[0188] In a preferred embodiment, the other therapeutic agent is a chemotherapeutic agent. A “chemotherapeutic agent,” as used herein, refers to a substance which, when administered to a subject, treats or prevents the development of cancer in the subject's body.

[0189] Chemotherapeutic agents include, but are not limited to, alkylating agents, anti-metabolites, anti-tumor antibiotics, mitotic inhibitors, chromatin function inhibitors, anti-angiogenesis agents, anti-estrogens, anti-androgens or immunomodulators.

[0190] “Alkylating agent” refers to any substance which can cross-link or alkylate any molecule, preferably nucleic acid (e.g., DNA), within a cell. Examples of alkylating agents include nitrogen mustard such as mechlorethamine, chlorambucol, melphalen, chlorydrate, pipobromen, prednimustin, disodic-phosphate or estramustine; oxazophorins such as cyclophosphamide, altretamine, trofosfamide, sulfofosfamide or ifosfamide; aziridines or imine-ethylenes such as thiotepa, triethylenamine or altetramine; nitrosourea such as carmustine, streptozocin, fotemustin or lomustine; alkyle-sulfonates such as busulfan, treosulfan or improsulfan; triazenes such as dacarbazine; or platinum complexes such as cis-platinum, oxaliplatin and carboplatin.

[0191] “Anti-metabolites” refer to substances that block cell growth and/or metabolism by interfering with certain activities, usually DNA synthesis. Examples of anti-metabolites include methotrexate, 5-fluoruracil, floxuridine, 5-fluorodeoxyuridine, capecitabine, cytarabine, fludarabine, cytosine arabinoside, 6-mercaptopurine (6-MP), 6-thioguanine (6-TG), chlorodesoxyadenosine, 5-azacytidine, gemcitabine, cladribine, deoxycoformycin and pentostatin.

[0192] “Anti-tumor antibiotics” refer to compounds which may prevent or inhibit DNA, RNA and/or protein synthesis. Examples of anti-tumor antibiotics include doxorubicin, daunorubicin, idarubicin, valrubicin, mitoxantrone, dactinomycin, mithramycin, plicamycin, mitomycin C, bleomycin, and procarbazine.

[0193] “Mitotic inhibitors” prevent normal progression of the cell cycle and mitosis. In general, microtubule inhibitors or taxoides such as paclitaxel and docetaxel are capable of inhibiting mitosis. Vinca alkaloid such as vinblastine, vincristine, vindesine and vinorelbine are also capable of inhibiting mitosis.

[0194] “Chromatin function inhibitors” or “topoisomerase inhibitors” refer to substances which inhibit the normal function of chromatin modeling proteins such as topoisomerase I or topoisomerase II. Examples of chromatin function inhibitors include, for topoisomerase I, camptothecine and its derivatives such as topotecan or irinotecan, and, for topoisomerase II, etoposide, etoposide phosphate and teniposide.

[0195] “Anti-angiogenesis agent” refers to any drug, compound, substance or agent which inhibits growth of blood vessels. Exemplary anti-angiogenesis agents include, but are by no means limited to, razoxin, marimastat, batimastat, prinomastat, tanomastat, ilomastat, CGS-27023A, halofuginon, COL-3, neovastat, BMS-275291, thalidomide, CDC 501, DMXAA, L-651582, squalamine, endostatin, SU5416, SU6668, interferon-alpha, EMD121974, interleukin-12, IM862, angiostatin and vitaxin.

[0196] “Anti-estrogen” or “anti-estrogenic agent” refer to any substance which reduces, antagonizes or inhibits the action of estrogen. Examples of anti-estrogen agents are tamoxifen, toremifene, raloxifene, droloxifene, iodoxyfene, anastrozole, letrozole, and exemestane.

[0197] “Anti-androgens” or “anti-androgen agents” refer to any substance which reduces, antagonizes or inhibits the action of an androgen. Examples of anti-androgens are flutamide, nilutamide, bicalutamide, sprironolactone, cyproterone acetate, finasteride and cimitidine.

[0198] “Immunomodulators” are substances which stimulate the immune system.

[0199] Examples of immunomodulators include interferon, interleukin such as aldesleukine, OCT-43, denileukin diflitox and interleukin-2, tumoral necrosis factors such as tasonermine or others immunomodulators such as lentinan, sizofiran, roquinimex, pidotimod, pegademase, thymopentine, poly I:C or levamisole in conjunction with 5-fluorouracil.

[0200] Chemical agents or cytotoxic agents include all kinase inhibitors such as, for example, gefitinib or erlotinib.

[0201] More generally, examples of suitable chemotherapeutic agents include but are not limited to 1-dehydrotestosterone, 5-fluorouracil decarbazine, 6-mercaptopurine, 6-thioguanine, actinomycin D, adriamycin, aldesleukin, alkylating agents, allopurinol sodium, altretamine, amifostine, anastrozole, anthramycin (AMC)), anti-mitotic agents, cis-dichlorodiamine platinum (II) (DDP) cisplatin), diamino dichloro platinum, anthracyclines, antibiotics, antimetabolites, asparaginase, BCG live (intravesical), betamethasone sodium phosphate and betamethasone acetate, bicalutamide, bleomycin sulfate, busulfan, calcium leucouorin, calicheamicin, capecitabine, carboplatin, lomustine (CCNU), carmustine (BSNU), Chlorambucil, Cisplatin, Cladribine, Colchicin, conjugated estrogens, Cyclophosphamide, Cyclothosphamide, Cytarabine, Cytarabine, cytochalasin B, Cytoxan, Dacarbazine, Dactinomycin, dactinomycin (formerly actinomycin), daunirubicin HCL, daunorucbicin citrate, denileukin diftitox, Dexrazoxane, Dibromomannitol, dihydroxy anthracin dione, Docetaxel, dolasetron mesylate, doxorubicin HCL, dronabinol, E. coli L-asparaginase, emetine, epoetin-α, Erwinia L-asparaginase, esterified estrogens, estradiol, estramustine phosphate sodium, ethidium bromide, ethinyl estradiol, etidronate, etoposide citrororum factor, etoposide phosphate, filgrastim, floxuridine, fluconazole, fludarabine phosphate, fluorouracil, flutamide, folinic acid, gemcitabine HCL, glucocorticoids, goserelin acetate, gramicidin D, granisetron HCL, hydroxyurea, idarubicin HCL, ifosfamide, interferon α-2b, irinotecan HCL, letrozole, leucovorin calcium, leuprolide acetate, levamisole HCL, lidocaine, lomustine, maytansinoid, mechlorethamine HCL, medroxyprogesterone acetate, megestrol acetate, melphalan HCL, mercaptipurine, mesna, methotrexate, methyltestosterone, mithramycin, mitomycin C, mitotane, mitoxantrone, nilutamide, octreotide acetate, ondansetron HCL, oxaliplatin, paclitaxel, pamidronate disodium, pentostatin, pilocarpine HCL, plimycin, polifeprosan 20 with carmustine implant, porfimer sodium, procaine, procarbazine HCL, propranolol, rituximab, sargramostim, streptozotocin, tamoxifen, taxol, tegafur, teniposide, tenoposide, testolactone, tetracaine, thioepa chlorambucil, thioguanine, thiotepa, topotecan HCL, toremifene citrate, trastuzumab, tretinoin, valrubicin, vinblastine sulfate, vincristine sulfate, and vinorelbine tartrate.

[0202] The term “tissue” is used herein to refer to tissue of a living or deceased organism or any tissue derived from or designed to mimic a living or deceased organism. The tissue may be healthy, diseased, and/or have genetic mutations. The biological tissue may include any single tissue (e.g., a collection of cells that may be interconnected) or a group of tissues making up an organ or part or region of the body of an organism. The tissue may comprise a homogeneous cellular material or it may be a composite structure such as that found in regions of the body including the thorax which for instance can include lung tissue, skeletal tissue, and/or muscle tissue. Exemplary tissues include, but are not limited to those derived from liver, lung, thyroid, skin, pancreas, blood vessels, bladder, kidneys, brain, biliary tree, duodenum, abdominal aorta, iliac vein, heart and intestines, including any combination thereof.

[0203] As used herein, “treating” or “treatment” of a disease in a subject refers to (1) preventing the symptoms or disease from occurring in a subject that is predisposed or does not yet display symptoms of the disease; (2) inhibiting the disease or arresting its development; or (3) ameliorating or causing regression of the disease or the symptoms of the disease. As understood in the art, “treatment” is an approach for obtaining beneficial or desired results, including clinical results. For the purposes of the present technology, beneficial or desired results can include one or more, but are not limited to, alleviation or amelioration of one or more symptoms, diminishment of extent of a condition (including a disease), stabilized (i.e., not worsening) state of a condition (including disease), delay or slowing of condition (including disease), progression, amelioration or palliation of the condition (including disease), states and remission (whether partial or total), whether detectable or undetectable. In one aspect, the term “treatment” excludes prevention.

[0204] As used herein, the term “efficacy” or “effectiveness” refers to the capacity of achieving a beneficial and/or desired result by a given intervention, such as contacting, administering and/or delivering one or more of a fusion protein, a polynucleotide, a vector, a composition or a method as disclosed herein. In one embodiment, the given intervention is an in vivo treatment of a subject. In another embodiment, the given intervention is performed/conducted ex vivo or in vitro, for example applied to an cancer cell or tissue isolated from a subject, or a cancer cell line. Non-limiting examples of a desired efficacy (which is also referred to as a therapeutic effect) include a successful treatment of a disease (for example, a cancer) in a subject, inhibition of a cancer cell growth in vivo, ex vivo or in vitro, and/or a change in biomarker. Various methods can be used for evaluating such efficacy including those disclosed in the examples. In certain embodiment, a desired efficacy may also include an increase of PTEN gene copy, PTEN mRNA, and/or PTEN protein in a cancer cell/tissue. Additionally or alternatively, a desired efficacy refers to an increase of (1) a PTEN protein, (2) a fragment, analogue, variant, mutant, isoform or equivalent of a PTEN protein, and/or (3) a fusion protein comprising (1) or (2) as described herein in a peri-cancerous area. The fusion protein of (3) may further comprise an amino acid sequence allowing its penetration into a cell (for example, a cancer cell), such as a serum albumin and/or a Minimal Cell Penetration Domain (MCPD) of a PTEN. The phrase “inhibiting a cancer cell growth” or any grammatical variation thereof, as used herein, refers to one or more of the following: inhibiting, arresting, metastasis, delaying and/or slowing down replication of the cancer cell, reducing the total number of the cancer cells, promoting cell death (such as apoptosis and necrosis) of the cancer cell, decreased expression of a cancer cell biomarker (such as an onco-miR, or a pi3K pathway pharmacodynamics biomarker), and/or presence or increased expression of a molecule lack or expressed at a low level in a cancer cell (such as PTEN).

### Modes for Carrying Out the Disclosure

[0205] This disclosure provides a fusion protein comprising, or alternatively consisting essentially of, or yet further consisting of consecutive amino acid sequences of a serum albumin (SA), including but not limited to human serum albumin (HSA), simian serum albumin (SSA), rat serum albumin (RSA), mouse serum albumin (MSA), or a deletion mutant, variant or analog thereof and the human PTEN-L or PTEN tumor suppressor or a deletion mutant, variant or analog thereof. In one embodiment, the amino acid sequence of the serum albumin is conjugated directly or indirectly to the N-terminal of the PTEN. In another embodiment, the amino acid sequence of the serum albumin is conjugated directly or indirectly to the C-terminal of the PTEN.

[0206] In one aspect, the serum albumin is selected from the group of a human serum albumin (HSA), a simian serum albumin (SSA), a rat serum albumin (RSA), or a mouse serum albumin (MSA), or a fragment, analogue, variant, mutant, isoform or equivalent of each. In another embodiment, the serum albumin comprises, or consists essentially of, or yet further consists of an albumin domain I equivalent to amino acids 1-197 of SEQ ID NO:13. In a further embodiment, the serum albumin comprises, or consists essentially of, or yet further consists of domains I and II of an albumin equivalent to amino acids 1-395 of SEQ ID NO:13. In yet a further embodiment, the albumin lacks an albumin domain III equivalent to amino acids 382-585 of SEQ ID NO:13. In certain embodiments, the albumin lacks an albumin domain II equivalent to amino acids 198-381 of SEQ ID NO:13. In one embodiment, the albumin lacks an albumin domain II and III equivalent to amino acids 198-585 of SEQ ID NO:13. In another embodiment, the albumin lacks the first 34 or 62 amino acids of a mature HSA or an equivalent thereof. Optionally, the albumin comprises, or consists essentially of, or yet further consists of an amino acid sequence of amino acids 35-385 or 63-585 of SEQ ID NO:13 or an equivalent thereof. In one embodiment, the serum albumin is a pre-protein which comprises a signal peptide or a mature serum albumin which lacks a signal peptide. In a further embodiment, the serum albumin comprises a mutation at a position equivalent to amino acid 58 or SEQ ID NO:12 or amino acid 34 of SEQ ID NO:13, optionally from Cysteine to Serine, or an equivalent of each that retains the mutation at amino acid 34 of SEQ ID NO:13. Additionally or alternatively, the serum albumin comprises an amino acid conjugated with a molecule at a position equivalent to amino acid 34 of SEQ ID NO:13, and wherein the molecule is a small molecule, a cytotoxic molecule, a linker, a pH-sensitive linker, and/or a thiol linker.

[0207] In one embodiment, the serum albumin comprises, or consists essentially of, or yet further consists of an amino acid sequence selected from the group of: SEQ ID NOs:12-13, 90-93 and 163, or a fragment, analogue, variant, mutant, isoform or an equivalent of any one of SEQ ID NOs:12-13, 90-93 and 163 that has the same or similar activity as SEQ ID NOs:12, 13, 90-93, or 163, respectively. Additionally or alternatively, the serum albumin comprises, or consists essentially of, or yet further consists of an amino acid sequence encoded by an engineered polynucleotide sequence selected from the group of: SEQ ID NO:176-179, or a sequence at least 90% identical thereto which encodes the same amino acid sequence as encoded by SEQ ID NO:176-179.

[0208] In another embodiment, the SA portion of the fusion protein comprises, or consists essentially of, or yet further consists of the amino acid sequence of SEQ ID NO:12-13 (HSA) or SEQ ID NO:90 (SSA), or SEQ ID NO:91 (RSA) or SEQ ID NO:92 (MSA), or a deletion mutant thereof such as the Minimal Human Serum Albumin (SEQ ID NO:163) or an equivalent, or a fragment, or a minimal fragment, or an analogue, or a variant of each thereof.

[0209] In a further aspect, the PTEN is selected from the group of mammalian, e.g. human PTEN, simian PTEN, rat PTEN, or murine PTEN. In one embodiment, the PTEN is in its mature form which lacks a single peptide (for example, SEQ ID NO:3), or is a pre-protein (for example, SEQ ID NO:1).

[0210] In one embodiment, the PTEN comprises, or consists essentially of, or yet further consists of a PTEN-Long (PTEN-L), or a fragment, analogue, variant, mutant, or equivalent thereof. In a further embodiment, the PTEN-L is a human PTEN-L having an amino acid sequence of SEQ ID NO:3, additionally or alternatively, the PTEN-L is a human PTEN-L encoded by an engineered polynucleotide sequence of SEQ ID NO:171 or nucleotide (nt) 64-nt 1728 of SEQ ID NO:171, or a sequence at least 90% identical thereto which encodes the same amino acid sequence as encoded by SEQ ID NO:171 or nucleotide (nt) 64-nt 1728 of SEQ ID NO:171. In one embodiment, the PTEN comprises an amino acid sequence encoded by an engineered polynucleotide sequence selected from the group of: SEQ ID NO:171, nucleotide (nt) 64-nt 1728 of SEQ ID NO:171, or SEQ ID NO:167, or a fragment thereof, or a sequence at least 90% identical thereto which encodes the same amino acid sequence as the amino acid sequence encoded by SEQ ID NO:171, nt 64-nt 1728 of SEQ ID NO:171, or SEQ ID NO:167, respectively. In certain embodiments, the PTEN comprises, or consists essentially of, or yet further consists of an amino acid sequence selected from the group of: SEQ ID NO:1 or 3 or 89, or a fragment, analogue, variant, mutant, or equivalent thereof.

[0211] In one embodiment, the PTEN comprises, or consists essentially of, or yet further consists of an amino acid sequence of SEQ ID NO:6 or 201, or a fragment, analogue, variant, mutant, or equivalent of SEQ ID NO:6 or 201. Additionally or alternatively, the PTEN comprises an amino acid sequence encoded by an engineered polynucleotide sequence selected from the group of: SEQ ID NO:198 or 204, or a fragment thereof, or a sequence at least 90% identical thereto which encodes the same amino acid sequence as the amino acid sequence encoded by SEQ ID NO:198 or 204, respectively. In one embodiment, the PTEN is a PTEN-M isoform, or a fragment, analogue, variant, mutant, or equivalent thereof. In certain embodiments, the PTEN-M is a human PTEN-M having an amino acid sequence of SEQ ID NO:6. Additionally or alternatively, the PTEN-M is a human PTEN-M encoded by an engineered polynucleotide sequence of SEQ ID NO:198, or a sequence at least 90% identical thereto which encodes the same amino acid sequence as SEQ ID NO:6.

[0212] In another embodiment, the PTEN comprises, or consists essentially of, or yet further consists of an amino acid sequence of SEQ ID NO:7 or 202, or a fragment, analogue, variant, mutant, or equivalent of SEQ ID NO:7 or 202. Additionally or alternatively, the PTEN comprises, or consists essentially of, or yet further consists of an amino acid sequence encoded by an engineered polynucleotide sequence selected from the group of SEQ ID NO:199, or 205, or a fragment thereof, or a sequence at least 90% identical thereto which encodes the same amino acid sequence as the amino acid sequence encoded by SEQ ID NO:199, or 205, respectively. In certain embodiments, the PTEN is a PTEN-N isoform, or a fragment, analogue, variant, mutant, or equivalent thereof. In a further embodiment, the PTEN-N is a human PTEN-N having an amino acid sequence of SEQ ID NO:7. Additionally or alternatively, the PTEN-N is a human PTEN-N encoded by an engineered polynucleotide sequence of SEQ ID NO:199, or a sequence at least 90% identical thereto which encodes the same amino acid sequence as SEQ ID NO:7.

[0213] In yet another embodiment, the PTEN comprises, or consists essentially of, or yet further consists of an amino acid sequence of SEQ ID NO:8 or 203, or a fragment, analogue, variant, mutant, or equivalent of SEQ ID NO:8 or 203. Additionally or alternatively, the PTEN comprises, or consists essentially of, or yet further consists of an amino acid sequence encoded by an engineered polynucleotide sequence selected from the group of: SEQ ID NO:200 or 206, or a fragment thereof, or a sequence at least 90% identical thereto which encodes the same amino acid sequence as the amino acid sequence encoded by SEQ ID NO:200 or 206. In certain embodiments, the PTEN is a PTEN-O isoform, or a fragment, analogue, variant, mutant, or equivalent thereof. In a further embodiment, the PTEN-O is a human PTEN-O having an amino acid sequence of SEQ ID NO:8. Additionally or alternatively, the PTEN-O is a human PTEN-O encoded by an engineered polynucleotide sequence of SEQ ID NO:200, or a sequence at least 90% identical thereto which encodes the same amino acid sequence as SEQ ID NO:8.

[0214] In one embodiment, the PTEN comprises, or consists essentially of, or yet further consists of an amino acid sequence selected from the group of: SEQ ID NO:2 or 88, or a fragment, analogue, variant, mutant, or equivalent of SEQ ID NO:2 or 88. Additionally or alternatively, the PTEN comprises an amino acid sequence encoded by an engineered polynucleotide sequence selected from the group of: SEQ ID NO:172 or 166, or a fragment thereof, or a sequence at least 90% identical thereto which encodes the same amino acid sequence as the amino acid sequence encoded by SEQ ID NO:172 or 166, respectively. In certain embodiments, the PTEN comprises, or consists essentially of, or yet further consists of a PTEN-S, or a fragment, analogue, variant, mutant, or equivalent thereof. In a further embodiment, the PTEN is a PTEN-S, or a fragment, analogue, variant, mutant, or equivalent thereof. In certain embodiments, the fusion protein lacks a cleavable linker between the PTEN-S and the albumin.

[0215] In another embodiment, the PTEN comprises, or consists essentially of, or yet further consists of a minimal PTEN-S, or a fragment, analogue, variant, mutant, or equivalent thereof. In a further embodiment, the minimal PTEN-S comprises, or consists essentially of, or yet further consists of an amino acid sequence of SEQ ID NO:162. Additionally or alternatively, the minimal PTEN-S comprises, or consists essentially of, or yet further consists of an amino acid sequence encoded by the engineered polynucleotide sequence selected SEQ ID NO:197, or a sequence at least 90% identical thereto which encodes the same amino acid sequence as SEQ ID NO:162.

[0216] In another embodiment, the PTEN comprises, or consists essentially of, or yet further consists of any one or more of the following: a mature human PTEN-L Unique Domain (LUD), or a fragment, analogue, variant, mutant, or equivalent thereof, optionally wherein the LUD comprises, or consists essentially of, or yet further consists of an amino acid sequence of SEQ ID NO:5, further optionally wherein the LUD comprises, or consists essentially of, or yet further consists of an amino acid sequence encoded by the engineered polynucleotide sequence of SEQ ID NO:193, or a sequence at least 90% identical thereto which encodes the same amino acid sequence as SEQ ID NO:5, and optionally wherein the LUD is glycosylated; a human PTEN-M Unique Domain (MUD), or a fragment, analogue, variant, mutant, or equivalent thereof, optionally wherein the MUD comprises, or consists essentially of, or yet further consists of an amino acid sequence of SEQ ID NO:9, and/or further optionally wherein the MUD comprises, or consists essentially of, or yet further consists of an amino acid sequence encoded by the engineered polynucleotide sequence of SEQ ID NO:194, or a sequence at least 90% identical thereto which encodes the same amino acid sequence as SEQ ID NO:9, and optionally wherein the MUD is glycosylated; a human PTEN-N Unique Domain (NUD), or a fragment, analogue, variant, mutant, or equivalent thereof, optionally wherein the NUD comprises, or consists essentially of, or yet further consists of an amino acid sequence of SEQ ID NO:10, and/or further optionally wherein the NUD comprises, or consists essentially of, or yet further consists of an amino acid sequence encoded by the engineered polynucleotide sequence of SEQ ID NO:195, or a sequence at least 90% identical thereto which encodes the same amino acid sequence as SEQ ID NO:10, and optionally wherein the NUD is glycosylated; a human PTEN-O Unique Domain (OUD), or a fragment, analogue, variant, mutant, or equivalent thereof, optionally wherein the OUD comprises, or consists essentially of, or yet further consists of an amino acid sequence of SEQ ID NO:11, and/or further optionally wherein the OUD comprises, or consists essentially of, or yet further consists of an amino acid sequence encoded by the engineered polynucleotide sequence of SEQ ID NO:196, or a sequence at least 90% identical thereto which encodes the same amino acid sequence as SEQ ID NO:11, and optionally wherein the OUD is glycosylated; a minimal cell-penetration domain (MCPD) comprising an amino acid sequence of 6xArg (SEQ ID NO:39), and optionally wherein the fusion protein comprises a cleavable linker between the PTEN and the albumin; a membrane-binding domain (MBD), optionally wherein the MBD comprises, or consists essentially of, or yet further consists of an amino acid sequence of SEQ ID NO:40; and a minimal PTEN-S, or a fragment, analogue, variant, mutant, or equivalent thereof, optionally wherein the minimal PTEN-S comprises, or consists essentially of, or yet further consists of an amino acid sequence of SEQ ID NO:162, and/or further optionally wherein the minimal PTEN-S comprises, or consists essentially of, or yet further consists of an amino acid sequence encoded by the engineered polynucleotide sequence of SEQ ID NO:197, or a sequence at least 90% identical thereto which encodes the same amino acid sequence as SEQ ID NO:162. In certain embodiments, one or more of the serine (S) and/or threonine (T) residues of the LUD, MUD, NUD, and/or OUD is O-glycosylated. Additionally or alternatively, one or more of asparagine (N) residues of the LUD, MUD, NUD, and/or OUD is N-glycosylated. In one embodiment the glycosylated residue(s) are at one or more of positions equivalent to the following: S65, S85, S89, S91, S94, S111, S115, S117, S129, S134, T140, S161, S163, S164 and S168 of SEQ ID NO:1 and/or S170, N292, S355, S360, S366 and S370 of SEQ ID NO:2. In certain embodiments, the glycosylated residue(s) are at one or more of positions equivalent to any one or more of the following: S115, S117, S129, S134, T140, S161, S163, S164 and S168 of SEQ ID NO: 1 or an equivalent thereof that retains these mutated amino acids. In a further embodiment, the glycosylated residue(s) are at one or more of positions equivalent to any one or more of the following: S115, S117, S163, S164 and S168 of SEQ ID NO: 1 or an equivalent thereof that retains these mutated amino acids.

[0217] In a further embodiment, the fusion protein further comprises one or more mutations selected a position equivalent to any one or more of the following: S65, S85, S89, S91, S94, S111, S115, S117, S129, S134, T140, S161, S163, S164 and S168 of SEQ ID NO:1 and/or S170, N292, S355, S360, S366 and S370 of SEQ ID NO:2. In certain embodiments, the fusion protein further comprises one or more mutations selected a position equivalent to any one or more of the following: S115, S117, S129, S134, T140, S161, S163, S164 and S168 of SEQ ID NO: 1 or an equivalent thereof that retains these mutated amino acids. In a further embodiment, the fusion protein further comprises one or more mutations selected a position equivalent to any one or more of the following: S115, S117, S163, S164 and S168 of SEQ ID NO: 1 or an equivalent thereof that retains these mutated amino acids. In yet a further embodiment, the amino acid is mutated to an aspartate or a glutamate.

[0218] In another embodiment, the PTEN comprises amino acids 174 to 576 of SEQ ID NO:1 and one or more of the following: amino acids 22-27, 44-59, 43-79, 80-120, 121-173 and/or 151-173 of SEQ ID NO:1. In one embodiment, the PTEN comprises amino acids 121-173 of SEQ ID NO:1 or an equivalent thereof. In a further embodiment, the PTEN comprises amino acids 121-173 of SEQ ID NO:1 and PTEN-S or an equivalent thereof. In a further embodiment, the PTEN comprises an amino acid sequence of SEQ ID NO: 25 or an equivalent thereof. In another embodiment, the PTEN comprises an amino acid sequence of SEQ ID NO: 50 or an equivalent thereof.

[0219] In one embodiment, the PTEN portion of the fusion protein comprises, or consists essentially of, or yet further consists of, the amino acid sequence of SEQ ID NO:1, 2, 3, 6, 7, 8, 88, 89, 134 or 162, or an equivalent, or a fragment, or a minimal fragment, or an analogue, or a variant of each.

[0220] In one embodiment, the fusion protein further comprises a signal peptide. In a further embodiment, the signal peptide is at the N-terminal of the fusion protein for secretion. In yet a further embodiment, the signal peptide is selected from the group of: an HSA signal peptide, an SSA signal peptide, an RSA signal peptide, an MSA signal peptide, a signal peptide of murine α2-macroglobulin, a murine fibrinogen signal peptide, a murine al-antitrypsin signal peptide, a murine IgGκ chain signal peptide, a human IgG heavy chain signal peptide, a human CD33 signal peptide, or an artificial signal peptide. In certain embodiments, the signal peptide comprises, or consists essentially of, or yet further consists of an amino acid sequence selected from the group of SEQ ID NOs:93-105. In one embodiment, the signal peptide is encoded by an engineered polynucleotide sequence selected from the group of: SEQ ID NOs:180-192, or a sequence at least 90% identical thereto which encodes the same amino acid sequence as SEQ ID NOs:93-105, respectively.

[0221] In one embodiment, the fusion protein further comprises a linker. In a further embodiment, the fusion protein comprises one or more of the following: a first linker between the albumin and the PTEN, a second linker at the C-terminal of the signal peptide and a third linker at the N-terminal of the fusion protein, and optionally wherein one or more of the linkers are cleavable. In one embodiment, the linker is cleavable by a protease present in a peri-cancerous cell or tissue. Non-limiting examples of the protease include MMP2, MMP9 or Cathepsin B. In a further embodiment, the linker comprises, or consists essentially of, or yet further consists of an amino acid sequence selected from the group of: SEQ ID NOs:164-165 and 106-108. In another embodiment, the linker and/or the fusion protein is cleavable by an intracellular protease, for example, a furin or a furin-like protease, or cathepsin B protease. In certain embodiments, the linker comprises, or consists essentially of, or yet further consists of an amino acid sequence selected from the group of SEQ ID NOs:48 or 106-108, and/or the PTEN comprises a Minimal Cell Penetration Domain (MCPD).

[0222] In one embodiment, the protease is selected from the group of ADAMS, ADAMS, ADAM10, ADAM12, ADAM15, ADAM17/TACE, ADAMDEC1, ADAMTS1, ADAMTS4, ADAMTS5, Aspartate proteases, e.g., BACE, Renin, Aspartic cathepsins, e.g., Cathepsin D, Cathepsin E, Caspases, e.g., Caspase 1, Caspase 2, Caspase 3, Caspase 4, Caspase 5, Caspase 6, Caspase 7, Caspase 8, Caspase 9, Caspase 10, Caspase 14, Cysteine cathepsins, e.g., Cathepsin B, Cathepsin C, Cathepsin K, Cathepsin L, Cathepsin S, Cathepsin V/L2, Cathepsin X/Z/P, Cysteine proteinases, e.g., Cruzipain, Legumain, Otubain-2, KLKs, e.g., KLK4, KLK5, KLK6, KLK7, KLK8, KLK10, KLK11, KLK13, KLK14, Metallo proteinases, e.g., Meprin, Neprilysin, PSMA, BMP-1, MMPs, e.g., MMP1, MMP3, MMP7, MMP8, MMP10, MMP11, MMP12, MMP13, MMP14, MMP15, MMP16, MMP17, MMP19, MMP20, MMP23, MMP24, MMP26, MMP27, Serine proteases, e.g., activated protein C, Cathepsin A, Cathepsin G, Chymase, coagulation factor proteases, (e.g., FVIIa, FIXa, FXa, FXIa, FXIIa), Elastase, Granzyme B, Guanidinobenzoatase, HtrA1, Human Neutrophil Elastase, Lactoferrin, Marapsin, NS3/4A, PACE4, Plasmin, PSA, tPA, Thrombin, Tryptase, uPA, Type II Transmembrane, Serine Proteases (TTSPs), e.g., DESC1, DPP-4, FAP, Hepsin, Matriptase-2, MT-SP1/Matriptase, TMPRSS2, TMPRSS3 or TMPRSS4.

[0223] In one embodiment, the fusion protein further comprises one or more of purification or detectable marker, for example, a 6xHis tag (SEQ ID NO: 243), a hemagglutinin (HA) tag, a flag tag, or any other epitope tag. In a further embodiment, one or more markers are at the C-terminal of the fusion protein and/or one or more markers are between the albumin and the PTEN.

[0224] Further provided are fusion proteins that comprise, or consist essentially of, or yet further consist of the amino acid sequence of SEQ ID NO:18, 19, 24, 25, or 164-171 or an equivalent, or a fragment, or a minimal fragment, or an analogue, or a variant of each thereof. Yet further provided are fusion proteins that comprise, or consist essentially of, or yet further consists of the amino acid sequence of SEQ ID NOs:28, 117-132 or a fragment, analogue or variant thereof, or an equivalent of each. Also provided is a fusion protein comprising, or consisting essentially of, or yet further consisting of an amino acid sequence selected from the group of: SEQ ID NOs:14-37, 49-50, or 109-132 or a fragment, analogue, variant, mutant, or equivalent of each of SEQ ID NOs:14-37, 49-50, or 109-132. Additionally or alternatively, the fusion protein comprises, or consists essentially of, or yet further consists of an amino acid sequence encoded by an engineered polynucleotide sequence selected from the group of: SEQ ID NOs:54-77 or 135-160 or a fragment thereof, or a sequence at least 90% identical thereto which encodes the same amino acid sequence as SEQ ID NOs:54-77 or 135-160 respectively.

[0225] In another embodiment, provided is an N′-albumin-PTEN-C′ fusion protein, for example, PR1 (SEQ ID NO:14; cDNA, 5′-albumin-PTEN-3′, SEQ ID NO:54), PR2 (SEQ ID NO:15; cDNA, 5′-albumin-PTEN-3′, SEQ ID NO:55), PR3 (SEQ ID NO:16; cDNA, 5′-albumin-PTEN-3′, SEQ ID NO:56), PR5 (SEQ ID NO:17; cDNA, 5′-albumin-PTEN-3′, SEQ ID NO:57), PR63 (SEQ ID NO:21; cDNA, 5′-albumin-PTEN-3′, SEQ ID NO:61), PR64 (SEQ ID NO:22; cDNA, 5′-albumin-PTEN-3′, SEQ ID NO:62), PR31 (SEQ ID NO:23; cDNA, 5′-albumin-PTEN-3′, SEQ ID NO:63), PR32 (SEQ ID NO:24; cDNA, 5′-albumin-PTEN-3′, SEQ ID NO:64), PR33 (SEQ ID NO:25; cDNA, 5′-albumin-PTEN-3′, SEQ ID NO:65), PR34 (SEQ ID NO:50; cDNA, 5′-albumin-PTEN-3′, SEQ ID NO:136). In another embodiment, provided is an N′-PTEN-L-albumin-C′ fusion protein, for example, PR4 (SEQ ID NO:26; cDNA, 5′-PTEN-L-albumin-3′, SEQ ID NO:66), PR401 (SEQ ID NO:27; cDNA, 5′-PTEN-L-albumin-3′, SEQ ID NO:67), PR402 (SEQ ID NO:28; cDNA, 5′-PTEN-L-albumin-3′, SEQ ID NO:68), PR403 (SEQ ID NO:29; cDNA, 5′-PTEN-L-albumin-3′, SEQ ID NO:69), PR404 (SEQ ID NO:30; cDNA, 5′-PTEN-L-albumin-3′, SEQ ID NO:70). In a further embodiment, created is a fusion protein comprising a N′ terminal minimal PTEN domain and a C′ terminal albumin. In yet a further embodiment, the minimal PTEN domain comprises an amino acid sequence of SEQ ID NO: 162. Additionally or alternatively, the albumin is an HSA and the fusion protein further comprises an HSA signal peptide and a 6xHis tag (SEQ ID NO: 243). In another embodiment, provided is an N′-PTEN-L-albumin-C′ fusion protein, for example, PR419 (SEQ ID NO:109; cDNA, 5′-PTEN-L-albumin-3′, SEQ ID NO:137), PR420 (SEQ ID NO:110; cDNA, 5′-PTEN-L-albumin-3′, SEQ ID NO:138), PR421 (SEQ ID NO:111; cDNA, 5′-PTEN-L-albumin-3′, SEQ ID NO:139), PR422 (SEQ ID NO:112; cDNA, 5′-PTEN-L-albumin-3′, SEQ ID NO:140), PR424 (SEQ ID NO:113; cDNA, 5′-PTEN-L-albumin-3′, SEQ ID NO:141), PR425 (SEQ ID NO:114; cDNA, 5′-PTEN-L-albumin-3′, SEQ ID NO:142), PR426 (SEQ ID NO:115; cDNA, 5′-PTEN-L-albumin-3′, SEQ ID NO:143), PR427 (SEQ ID NO:116; cDNA, 5′-PTEN-L-albumin-3′, SEQ ID NO:144), PR428 (SEQ ID NO:117; cDNA, 5′-PTEN-L-albumin-3′, SEQ ID NO:145), PR409 (SEQ ID NO:118; cDNA, 5′-PTEN-L-albumin-3′, SEQ ID NO:146), PR415 (SEQ ID NO:119; cDNA, 5′-PTEN-L-albumin-3′, SEQ ID NO:147), PR416 (SEQ ID NO:120; cDNA, 5′-PTEN-L-albumin-3′, SEQ ID NO:148), PR413 (SEQ ID NO:121; cDNA, 5′-PTEN-L-albumin-3′, SEQ ID NO:149), PR414 (SEQ ID NO:122; cDNA, 5′-PTEN-L-albumin-3′, SEQ ID NO:150), PR417 (SEQ ID NO:123; cDNA, 5′-PTEN-L-albumin-3′, SEQ ID NO:151), and PR418 (SEQ ID NO:124; cDNA, 5′-PTEN-L-albumin-3′, SEQ ID NO:152). In another embodiment, provided is an N′-albumin-PTEN-C′ fusion protein, for example, PR6 (SEQ ID NO:18; cDNA, 5′-albumin-PTEN-3′, SEQ ID NO:58), PR61 (SEQ ID NO:19; cDNA, 5′-albumin-PTEN-3′, SEQ ID NO:59), PR62 (SEQ ID NO:20; cDNA, 5′-albumin-PTEN-3′, SEQ ID NO:60), PR66 (SEQ ID NO:126; cDNA, 5′-albumin-PTEN-3′, SEQ ID NO:154), PR67 (SEQ ID NO:127; cDNA, 5′-albumin-PTEN-3′, SEQ ID NO:155) and PR68 (SEQ ID NO:128; cDNA, 5′-albumin-PTEN-3′, SEQ ID NO:156). In another embodiment, provided is an N′-PTEN-S-albumin-C′ fusion protein, for example, PR65 (SEQ ID NO:125; cDNA, 5′-PTEN-S-albumin-3′, SEQ ID NO:153). In another embodiment, provided is an N′-PTEN-S-albumin-PTEN-S-C′ fusion protein, for example, PR911 (SEQ ID NO:37; cDNA, 5′-PTEN-S-albumin-PTEN-S-3′, SEQ ID NO:77). In another embodiment, provided is an N′-PTEN-L-albumin-C′ fusion protein, for example, PR405 (SEQ ID NO:129; cDNA, 5′-PTEN-L-albumin-3′, SEQ ID NO:157), PR406 (SEQ ID NO:130; cDNA, 5′-PTEN-L-albumin-3′, SEQ ID NO:158), PR407 (SEQ ID NO:131; cDNA, 5′-PTEN-L-albumin-3′, SEQ ID NO:159) and PR408 (SEQ ID NO:132; cDNA, 5′-PTEN-L-albumin-3′, SEQ ID NO:160). In a further embodiment, provided is a fusion protein comprising a N′ terminal albumin and a C′ terminal minimal PTEN domain. In yet a further embodiment, the minimal PTEN domain comprises an amino acid sequence of SEQ ID NO: 162. Additionally or alternatively, the albumin is an HSA and the fusion protein further comprises an HSA signal peptide and a 6xHis tag (SEQ ID NO: 243).

[0226] In another embodiment, provided is an N′-albumin-LUD-p53-C′ fusion protein, for example, F131 (SEQ ID NO:38; cDNA SEQ ID NO:78). In another embodiment, provided is an N′-LUD-p53-albumin-C′ fusion, for example, F137 (SEQ ID NO:133; cDNA SEQ ID NO:161).

[0227] In certain embodiments, the albumin is replaced with a Fc or a thioredoxin. In one embodiment, provided is an N′-PTEN-L-Fc-C′ fusion protein, for example, PR7 (SEQ ID NO:34; cDNA, 5′-PTEN-L-Fc-3′, SEQ ID NO:74), PR700 (SEQ ID NO:35; cDNA, 5′-PTEN-L-Fc-3′, SEQ ID NO:75). In another embodiment, provided is an N′-Fc-PTEN-L-C′ fusion protein, for example, PR8 (SEQ ID NO:36; cDNA, 5′-Fc-PTEN-L-3′, SEQ ID NO:76). In another embodiment, provided is an N′-Thioredoxin-PTEN-L-C′ fusion protein: PR430 (SEQ ID NO:49; cDNA, 5′-Thioredoxin-PTEN-L-3′, SEQ ID NO:135).

[0228] In yet another embodiment, provided is a fusion protein comprising an amino acid sequence selected from SEQ ID NO: 14-30, 34-37, 49-50 and 109-132. In a further embodiment, the protein further comprises an N-terminal signal peptide, for example, encoded by a sequence selected from [nt (1-63) of SEQ ID NO: 171 or SEQ ID NO: 180-192]. In yet another embodiment, the fusion protein lacks signal peptide but comprises an initiator methionine residue (optionally encoded by ATG) is placed at the N terminal of either albumin or PTEN, respectively, as appropriate. In another embodiment, the fusion protein lacks signal peptide but comprises an initiator methionine (optionally encoded by ATG) replacing the first residue of albumin (for example, a mature albumin) or of PTEN [for example, a mature PTEN-L]. In another embodiment, the polynucleotide comprises one or more of SEQ ID NO:54-70, 74-77 or 135-160.

[0229] Compositions and Combinations with Checkpoint Antibodies

[0230] Several classes of checkpoint inhibitors/regulators are known in the art, including lymphocyte activation gene-3 (LAG-3), T cell immunoglobulin and ITIM domain (TIGIT), T cell immunoglobulin and mucin-domain containing-3 (TIM-3), V-domain immunoglobulin suppressor of T cell activation (VISTA), B7 homolog 3 protein (B7-H3), inducible T cell costimulatory (ICOS) and B and T lymphocyte attenuator (BTLA), anti-cytotoxic T lymphocyte associated antigen-4 (CTLA-4) as well as inhibitors of CTLA-4, programmed death 1 (PD-1; also referred to herein as PD1), and programmed death ligand-1 (PD-L1).

[0231] The latter 3 classes of checkpoint inhibitors, CTLA-4, PD-1 and PD-L1 inhibitors, have contributed several medically relevant drugs such as monoclonal antibody (mAb) inhibitors. Example of anti-CTLA-4 inhibitory mAb is ipilimumab (approved globally). Example of anti-PD-L1 inhibitory mAbs are atezolizumab, avelumab and durvalumab (approved globally). Non-limiting examples of anti-PD1 inhibitor mAbs include pembrolizumab and nivolumab (approved globally); sintilimab, tislelizumab, toripalimab, and camrelizumab (approved in China); geptanolimab serplulimab zimberelimab cemiplimab, dostarlimab, prolgolimab, balstilimab, penpulimab, retifanlimab, cadonilimab, pucotenlimab, sasanlimab, and cetrelimab.

[0232] Checkpoint inhibitory mAbs of distinct subclasses can be combined in a distinct modality (e.g. ipilimumab+nivolumab), or combined individually with chemotherapy, biologic therapies, anti-angiogenic therapies such as VEGF inhibitors, anti-TGFβs, cell therapies, mRNA therapies and so on.

[0233] Checkpoint inhibitors have also been combined with oncolytic viruses to elicit promising preclinical and clinical results. The biggest advantage of a virotherapy/immune checkpoint therapy combination is the oncolysis component commanded by the virus. Indeed, because of defects in the interferon pathway in cancer cells, oncolytic viruses are able to replicate therein to ultimately lyse the cells and release cancer-associated antigens. These are typically mutated neo-antigenic forms of cellular proteins that can awaken the immune system to act to their clearance. Oncolytic viruses are therefore preferred means of “warming up” cold tumors, especially in combination with checkpoint inhibitor mAbs, which presumably also cause immune cell activation. However, as demonstrated herein, not all oncolytic viruses are the same with respect to checkpoint synergy. Indeed, in some aspects of the present disclosure, mouse anti-PD1 synergizes with or is sensitized by an oncolytic virus carrying the cDNA encoding for albumin-PTEN-S (PR61; SEQ ID NO:226) but may not do so when the virus carries the cDNA encoding for PR41 (SEQ ID NO:223) or PR71 (SEQ ID NO:229) protein. The absence of synergy/additivity between anti-PD1 antibody and PTEN-L protein expressed from an oncolytic virus (SEQ ID NO:224) was highly unexpected, because it contrasts theoretical predictions (Chen & Eng, 2019; PMID: 30928438) and experimental observations (Russell et al, 2018: PMID: 30479334—though a direct combination of PTEN-L and exogenous anti-PD1 was not performed by Russell et al, 2018; PMID: 30479334). Importantly, mouse anti-PD1 does not co-operate with oHSV2-GFP (which would be deemed an empty oHSV) either, suggesting that the payload carried by HSV2 is highly specific in its ability to synergize with anti-PD1. In fact, it is demonstrated herein that when a mouse anti-PD1 antibody is added to an OHSV2-PR61 virus (SEQ ID NO:241), the anti-PD1 antibody specifically increases overall survival afforded by the virus acting alone, wherein the specific expression of the PR61 fusion protein (SEQ ID NO:227) but not of other albumin-PTEN fusion proteins mediates this additional increase in overall survival. This property of PR61 discovered herein may be highly relevant for cancer care, because while combination of oncolytic viruses with checkpoint antibodies may roughly double patient response vs. virotherapy alone (from 31.5% ORR using T-Vec aka oHSV1-GMCSF alone to 61.9% for a T-Vec/pembrolizumab combination; data corresponding to different trials though; reviewed in Larocca et al, 2020; PMID: 32767272), yet still a large number of patients (about 35%) respond poorly or not at all to the virotherapy/checkpoint combination. Without being bound by theory, expression of the cell-permeable wild-type PTEN tumor suppressor via the PR61 fusion protein (SEQ ID NO:227) will increase the response of all patients, both the responders and the non-responders, in line with the universal applicability of PTEN replacement therapy across essentially all known cancers (given that all cancers ultimately lose PTEN).

[0234] In another aspect, PR61 protein (SEQ ID NO:227) may be limited in its anti-cancer action in FIG. 25 because it comprises the human serum albumin, which is called to work in a mouse background. However, it is known that unlike PTEN-S which is essentially identical between mouse and human (only 1 Ser/Thr conversion in 403 residues), mouse serum albumin shares only 72% identical residues to HSA (calculated from alignment of SEQ ID NO:92 and SEQ ID NO:13); as such, the mouse FcRn albumin receptor is largely if not totally incapable of internalizing human albumin injected in a mouse in the face of large amounts of endogenous mouse albumin (Merten et al, 2021; PMID: 34303832). Hence, assuming that FcRn mediates PR61 cell penetration, PR61 (SEQ ID NO:227) most likely does not elicit its full anti-cancer and immunomodulatory potential in a mouse setting.

[0235] The oncolytic viral vector expressing albumin-PTEN fusion and immune checkpoint inhibitor combinations disclosed herein can be administered to a patient in need of treatment for cancer receiving a combination of chemotherapeutic agents. Use of other combinations of chemotherapeutic agents disclosed herein is also possible.

[0236] Oncolytic virotherapy with albumin-PTEN fusions and immune checkpoint inhibitor combination therapy can be further combined with viral particle delivery potentiators. Polymeric nanocups such as the FDA-approved ultrasound contrast agent Sonovue (Bracco International) and the gas-stabilizing nanoscale SonoTran Particles (OxSonics Ltd., UK) are preferred delivery potentiators. These polymeric agents can be administered by i.v. injection to a subject, preferably together with the albumin-PTEN virus also administered by i.v. injection, and then subjected to focused ultra-sound mediated activation, wherein the polymeric agents increase in volume and open parodic cavities in the tumoral tissue, thereby facilitating increased delivery of the oncolytic virus into the tumor, which leads to higher treatment efficacy in the absence of toxicity. Moreover, the SonoTran platform allows for ultrasound-mediated imaging of the tumor tissue in vivo, thereby linking treatment to a clinically relevant biomarker. The SonoTran platform has been shown to facilitate delivery of both large oncolytic viruses such as a recombinant vaccinia virus and antibodies (Grundy et al, 2021: PMID: 33426913).

[0237] In one embodiment, the oncolytic virus expressing an albumin-PTEN is combined with Sonovue particles.

[0238] In another embodiment, the oncolytic virus expressing an albumin-PTEN is combined with SonoTran particles and imaged via acoustic ultrasounds.

[0239] In one embodiment, the subject receives albumin-PTEN virotherapy and SonoTran particles co-administered i.v. and imaged via ultrasounds. In another embodiment, SonoTran treatment is combined with an albumin-PTEN virus containing a single payload gene, namely SEQ ID NO:226. In another embodiment, SonoTran treatment is combined with an albumin-PTEN virus containing a double payload gene, namely SEQ ID NO:226 and SEQ ID NO:222. In another embodiment, SonoTran treatment is combined with an albumin-PTEN virus containing a double payload gene, namely SEQ ID NO:226 and SEQ ID NO:222, wherein the latter cDNA is expressed under the control of the ULp38 promoter (SEQ ID NO:234).

[0240] The oncolytic viral vector expressing albumin-PTEN fusion and immune checkpoint inhibitor combinations disclosed herein can also be combined with other therapeutic antibodies such as, for example, but not by way of limitation, an anti-EGFR (EGF receptor) monoclonal antibody or an anti-VEGF monoclonal antibody. Specific examples of anti-EGFR antibodies include cetuximab and panitumumab. A non-limiting example of an anti-VEGF antibody is bevacizumab (SEQ ID NO:240).

[0241] The oncolytic HSV albumin-PTEN viruses disclosed herein can be further conjugated to polymers, such as dendrimers, aptamers, polymeric coatings, polyethylenoglycol, hydrogels and the like. Without being bound by theory, these materials protect the virus from the neutralizing activity of the immune system, thereby allowing for and/or enhanced expression of the viral payload upon intravenous delivery. See for example Kaygisiz & Synatschke, 2020: PMID: 33025967.

[0242] In other embodiments, the oncolytic HSV albumin-PTEN viruses disclosed herein can be loaded on mesenchymal stem cells (MSCs). Mesenchymal stem cells are immature cells capable of self-renewing and differentiating into many cell types that belong to three germinal layers. Due to their inherent tumor tropism mesenchymal stem cells loaded with oncolytic virus can improve delivery of the therapeutic cargo to cancer sites. Shielding of oncolytic viral construct from antiviral host immune response makes these cells prospective delivery vehicles to even hard-to-reach metastatic neoplastic foci. As a non-limiting example, an oHSV1-PTEN-L virus was loaded on MSCs to treat brain and breast cancer (see WO/2021/024207 A1).

[0243] Compositions of oncolytic viral vectors such as oHSV2-PR61 and immune checkpoint inhibitors can be administered singly, as mixtures of one or more oncolytic viral vectors encoding an albumin-PTEN fusion and/or one or more immune checkpoint inhibitors, in mixture or combination with other agents useful for treating cancer, or adjunctive to other therapy for cancer. Examples of suitable combination and adjunctive therapies are provided below.

[0244] Encompassed by the present disclosure are pharmaceutical kits containing oncolytic viral vectors such as oHSV2-PR61 and immune checkpoint inhibitors described herein. The pharmaceutical kit is a package comprising oncolytic viral vector such as oHSV2-PR61 and/or immune checkpoint inhibitor (e.g., either in lyophilized form or as an aqueous solution) and one or more of the following: a third therapeutic agent, for example as described later herein; a device for administering the oncolytic viral vector such as oHSV2-PR61 and/or immune checkpoint inhibitor, for example a pen, needle and/or syringe; and/or pharmaceutical grade water or buffer to resuspend the antibody if the antibody and/or the inhibitor is in lyophilized form.

[0245] Each unit dose of the oncolytic viral vector such as oHSV2-PR61 and/or immune checkpoint inhibitor can be packaged separately, and a kit can contain one or more unit doses (e.g., two unit doses, three unit doses, four unit doses, five unit doses, eight unit doses, ten unit doses, or more). In a specific embodiment, the one or more unit doses are each housed in a syringe or pen.

[0246] Effective Dosages

[0247] The combinations of oncolytic viral vector such as oHSV2-PR61 and immune checkpoint inhibitors will generally be used in an amount effective to achieve the intended result, for example an amount effective to treat cancer in a subject in need thereof. Pharmaceutical compositions comprising oncolytic viral vector such as oHSV2-PR61 and/or immune checkpoint inhibitors can be administered to patients (e.g., human subjects) at therapeutically effective dosages.

[0248] The term “therapeutically effective dosage” means an amount of active compound or conjugate that elicits the desired biological response in a subject. Such response includes alleviation of the symptoms of the disease or disorder being treated, prevention, inhibition or a delay in the recurrence of symptom of the disease or of the disease itself, an increase in the longevity or overall survival of the subject compared with the absence of the treatment, or prevention, inhibition or delay in the progression of symptom of the disease or of the disease itself. More specifically, a “therapeutically effective” dosage as used herein is an amount that confers a therapeutic benefit. A therapeutically effective dosage is also one in which any toxic or detrimental effects of the agent are outweighed by the therapeutically beneficial effects. In the context of cancer therapy, a therapeutic benefit means any amelioration of cancer, including any one of, or combination of, halting or slowing the progression of cancer (e.g., from one stage of cancer to the next), halting or delaying aggravation or deterioration of the symptoms or signs of cancer, reducing the severity of cancer, inducing remission of cancer, inhibiting tumor cell proliferation, tumor size, or tumor number.

[0249] Determination of the effective amount is well within the capability of those skilled in the art, especially in light of the detailed disclosure provided herein. Toxicity and therapeutic efficacy of a compound or a conjugate can be determined by standard pharmaceutical procedures in cell cultures and in experimental animals. The effective amount of present combination or other therapeutic agent to be administered to a subject will depend on the stage, category and status of the multiple myeloma and characteristics of the subject, such as general health, age, sex, body weight and drug tolerance. The effective amount of the present combination or other therapeutic agent to be administered will also depend on administration route and dosage form. Dosage amount and interval can be adjusted individually to provide plasma or intratumoral levels of the active compound that are sufficient to maintain desired therapeutic effects.

[0250] The amount of the combination of oncolytic viral vector such as oHSV2-PR61 and immune checkpoint inhibitor administered will depend on a variety of factors, including the nature and stage of the cancer being treated, the form, route and site of administration, the therapeutic regimen (e.g., whether another therapeutic agent is used), the age and condition of the particular subject being treated, the sensitivity of the patient being treated to oncolytic viral vector such as oHSV2-PR61 and/or and immune checkpoint inhibitors. The appropriate dosage can be readily determined by a person skilled in the art. Ultimately, a physician will determine appropriate dosages to be used. This dosage can be repeated as often as appropriate. If side effects develop the amount and/or frequency of the dosage can be altered or reduced, in accordance with normal clinical practice. The proper dosage and treatment regimen can be established by monitoring the progress of therapy using conventional techniques known to the people skilled of the art.

[0251] Effective dosages can be estimated initially from in vitro assays. Calculating dosages to achieve such circulating blood or serum concentrations taking into account the bioavailability of oncolytic viral vector such as oHSV2-PR61 and/or the checkpoint antibody is well within the capabilities of skilled artisans. Initial dosages can be estimated from in vivo data, such as animal models. Animal models useful for testing the efficacy of compounds to treat cancer are well known in the art. Additionally, animal models of cancer are described herein. Ordinarily skilled artisans can routinely adapt such information to determine dosages suitable for human administration. Non-limiting, yet detailed examples of phase I dose calculation for intratumoral oncolytic virus administration in combination with checkpoint antibodies and other treatment modalities is provided in Champiat et al, 2021: PMID: 32943460.

[0252] Amount, frequency, and duration of administration will depend on a variety of factors, such as the patient's age, weight, and disease condition. A therapeutic regimen for administration can continue for 2 weeks to indefinitely, for 2 weeks to 6 months, from 3 months to 5 years, from 6 months to 1 or 2 years, from 8 months to 18 months, or the like. Optionally, the therapeutic regimen provides for repeated administration, e.g., once daily, twice daily, every two days, three days, five days, one week, two weeks, or one month. The repeated administration can be at the same dose or at a different dose. The administration can be repeated once, twice, three times, four times, five times, six times, seven times, eight times, nine times, ten times, or more. A therapeutically effective amount of a combination of oncolytic viral vector such as oHSV2-PR61 and immune checkpoint inhibitor can be administered as a single dose or over the course of a therapeutic regimen, e.g., over the course of a week, two weeks, three weeks, one month, three months, six months, one year, or longer (Champiat et al, 2021: PMID: 32943460). In one aspect, the proteins, fusion proteins, fragments, analogues, or variants thereof further comprise, or consist essentially of, or yet further consist of a detectable or purification label, examples of such are known in the art and briefly described herein.

### Polynucleotides

[0253] Further provided are isolated and/or engineered polynucleotides encoding a fusion protein of this disclosure, as well as vectors and host cell systems comprising a polynucleotide (for example, one or more of the polynucleotide). In one embodiment, the isolated and/or engineered polynucleotides, vectors or host cells further comprises a detectable or purification marker.

[0254] In one aspect the polynucleotides are sequence-optimized (e.g. SEQ ID NO:41-47; 54-78, 86, 135-161, 166-167, 171-172, 176-200, and 204-206), for example, for high efficiency of gene expression in the host cell, including but not limited to: Codon usage bias, GC content, CpG dinucleotides content, mRNA secondary structure, cryptic splicing sites, premature polyA sites, internal chi sites and ribosomal binding sites, negative CpG islands, RNA instability motif (ARE), repeat sequences (direct repeat, reverse repeat, and dyad repeat), restriction sites that may interfere with cloning, a strong Kozak sequence and introduction of strong termination codons. Various algorithms and tools are available for performing such codon optimization, such as OptimumGene™.

[0255] In one embodiment, the polynucleotide comprises, or alternatively consists essentially of, or yet further consists of an engineered polynucleotide sequence selected from the group of: SEQ ID NOs: 54-70, 74-77, 135-160 or a fragment thereof. In a further embodiment, the polynucleotide comprises, or alternatively consists essentially of, or yet further consists of a polynucleotide at least 90% identical to any one of SEQ ID NOs: 54-70, 74-77, 135-160 and encoding the same amino acid sequence as SEQ ID NOs: 54-70, 74-77, 135-160, respectively. In one embodiment, the polynucleotide comprises, or alternatively consists essentially of, or yet further consists of an engineered polynucleotide sequence selected from the group of: SEQ ID NOs: 68, 59, 58, 157, 159, 65, or 136, or a fragment thereof. In a further embodiment, the polynucleotide comprises, or alternatively consists essentially of, or yet further consists of a polynucleotide at least 90% identical to any one of SEQ ID NOs: 68, 59, 58, 157, 159, 65, or 136 and encoding the same amino acid sequence as SEQ ID NOs: 68, 59, 58, 157, 159, 65, or 136, respectively.

[0256] Additionally or alternatively, the engineered polynucleotide sequence comprises, or alternatively consists essentially of, or yet further consists of an engineered polynucleotide sequence selected from the group of: SEQ ID NOs:176-179, or a polynucleotide sequence at least 90% identical thereto which encodes the same amino acid sequence as encoded by SEQ ID NOs:176-179.

[0257] In certain embodiments, the engineered polynucleotide sequence comprises, or alternatively consists essentially of, or yet further consists of an engineered polynucleotide sequence selected from the group of: SEQ ID NOs: 166-172, 193-200, or 204-206, or a polynucleotide sequence at least 90% identical thereto which encodes the same amino acid sequence as encoded by SEQ ID NOs: 166-172, 193-200, or 204-206.

[0258] In certain embodiments, the engineered polynucleotide sequence comprises, or alternatively consists essentially of, or yet further consists of an engineered polynucleotide sequence selected from the group of: SEQ ID NOs: 180-192, or a polynucleotide sequence at least 90% identical thereto which encodes the same amino acid sequence as encoded by SEQ ID NOs: 180-192.

[0259] In certain embodiments, the engineered polynucleotide sequence comprises, or alternatively consists essentially of, or yet further consists of one or more engineered polynucleotides selected from any polynucleotides as summarized in Table 1 and listed herein, or a polynucleotide sequence at least 90% identical thereto which encodes the same amino acid sequence.

[0260] In one aspect, the polynucleotides further comprise polynucleotides that encode cell penetrating domains (e.g., SEQ ID NO:168-170). In another aspect, the polynucleotides further comprise polynucleotides encoding for secretory peptides, allowing for the secretion of the pre-protein into the culture supernatant following cleavage of the secretory peptide (e.g., SEQ ID NO:93-105). In a further aspect the polynucleotides are operatively linked to promoters, enhancers, introns, polyadenylation signals or other regulatory polynucleotides for the expression of the polynucleotides in host cell systems. In one embodiment, the regulatory sequences are suitable for used in a vector (viral or non-viral). In one embodiment, the regulatory sequences are tumor-specific, for example, an AFP promoter specific for hepatocellular carcinoma, a CCKAR promoter specific for pancreatic cancer, a CEA promoter specific for epithelial cancer, a c-erbB2 promoter specific for breast and pancreas cancer, a COX-2 promoter, a CXCR4 promoter, an E2F-1 promoter, a HE2 promoter, a LP promoter, a MUC1 promoter, a PSA promoter specific for prostate cancer, a survivin promoter, a TRP1 promoter specific for melanoma, a Tyr promoter specific for melanoma, an AFP/hAFP promoter specific for hepatocellular carcinoma, a SV40/AFP promoter specific for hepatocellular carcinoma, a CEA/CEA promoter specific for epithelial cancer, a PSA/PSA promoter specific for prostate cancer, or a SV40/Tyr promoter specific for melanoma. Non-limiting examples of such polynucleotides include a double-strand DNA, a single-strand DNA, a RNA (for example an mRNA), or a hybrid thereof. In a further embodiment, the polynucleotide is an mRNA suitable for use in an mRNA therapy.

[0261] In certain embodiments, the polynucleotide further comprises or encodes a short hairpin RNA, or a small hairpin RNA. Such secondary structure of RNA can guide RNA folding, determine interactions in a ribozyme, protect mRNA from degradation, serve as a recognition motif for RNA-binding protein, and also regulate gene expression. Additionally or alternatively, the short hairpin RNA may be processed into small interfering RNAs (siRNA), for example suitable for use in treating a cancer. See, e.g., Mahmoodi Chalbatani G et al, 2019: PMID: 31118626.

[0262] Aspects of the disclosure relate to a vector comprising one or more of the isolated polynucleotides or nucleic acids described above. In one embodiment, the vector comprises, or alternatively consists essentially of, or yet further consists of an engineered polynucleotide sequence selected from the group of: SEQ ID NOs: 54-70, 74-77, 135-160 or a fragment thereof. In a further embodiment, the vector comprises, or alternatively consists essentially of, or yet further consists of a polynucleotide at least 90% identical to any one of SEQ ID NOs: 54-70, 74-77, 135-160 and encoding the same amino acid sequence as SEQ ID NOs: 54-70, 74-77, 135-160, respectively. In another embodiment, the vector comprises, or alternatively consists essentially of, or yet further consists of an engineered polynucleotide sequence selected from the group of: SEQ ID NOs: 68, 59, 58, 157, 159, 65, or 136, or a fragment thereof. In a further embodiment, the vector comprises, or alternatively consists essentially of, or yet further consists of a polynucleotide at least 90% identical to any one of SEQ ID NOs: 68, 59, 58, 157, 159, 65, or 136 and encoding the same amino acid sequence as SEQ ID NOs: 68, 59, 58, 157, 159, 65, or 136, respectively. In yet a further embodiment, the vector further comprises a polynucleotide encoding a heterologous protein as described herein. In one embodiment, the vector further comprises an engineered polynucleotide sequence selected from SEQ ID NOs: 74 to 77 and 161, or a polynucleotide at least 90% identical to any one of SEQ ID NOs: 74 to 77 and 161 and encoding the same amino acid sequence as encoded by SEQ ID NOs: 74 to 77 and 161, respectively.

[0263] In one embodiment, the vector comprises, or alternatively consists essentially of, or yet further consists of an engineered polynucleotide sequence selected from the group of: SEQ ID NOs: 54-70, 74-77, 135-160 or a fragment thereof. In a further embodiment, the vector comprises, or alternatively consists essentially of, or yet further consists of a polynucleotide at least 90% identical to any one of SEQ ID NOs: 54-70, 74-77, 135-160 and encoding the same amino acid sequence as SEQ ID NOs: 54-70, 74-77, 135-160, respectively. In one embodiment, the vector comprises, or alternatively consists essentially of, or yet further consists of an engineered polynucleotide sequence selected from the group of: SEQ ID NOs: 68, 59, 58, 157, 159, 65, or 136, or a fragment thereof. In a further embodiment, the vector comprises, or alternatively consists essentially of, or yet further consists of a polynucleotide at least 90% identical to any one of SEQ ID NOs: 68, 59, 58, 157, 159, 65, or 136 and encoding the same amino acid sequence as SEQ ID NOs: 68, 59, 58, 157, 159, 65, or 136, respectively.

[0264] Additionally or alternatively, the vector comprises, or alternatively consists essentially of, or yet further consists of an engineered polynucleotide sequence selected from the group of: SEQ ID NOs:176-179, or a polynucleotide sequence at least 90% identical thereto which encodes the same amino acid sequence as encoded by SEQ ID NOs:176-179.

[0265] In certain embodiments, the vector comprises, or alternatively consists essentially of, or yet further consists of an engineered polynucleotide sequence selected from the group of: SEQ ID NOs: 166-172, 193-200, or 204-206, or a polynucleotide sequence at least 90% identical thereto which encodes the same amino acid sequence as encoded by SEQ ID NOs: 166-172, 193-200, or 204-206.

[0266] In certain embodiments, the vector comprises, or alternatively consists essentially of, or yet further consists of an engineered polynucleotide sequence selected from the group of: SEQ ID NOs: 180-192, or a polynucleotide sequence at least 90% identical thereto which encodes the same amino acid sequence as encoded by SEQ ID NOs: 180-192.

[0267] In certain embodiments, the vector comprises, or alternatively consists essentially of, or yet further consists of one or more engineered polynucleotides selected from any polynucleotides as summarized in Table 1 and listed herein, or a polynucleotide sequence at least 90% identical thereto which encodes the same amino acid sequence.

[0268] In certain embodiments, the vector is a plasmid or a viral vector selected from the group of a retroviral vector, a lentiviral vector, an adenoviral vector, and an adeno-associated viral vector (AAV). In one embodiment, the vector is a viral vector. In a further embodiment, the vector is selected from the group of: rabies virus, flavivirus, lentivirus, baculovirus, retroviral vectors, adenovirus vectors (AdV), adeno-associated virus vectors (AAV), herpes simplex virus vectors (HSV), alphavirus vectors, Seneca Valley virus, poliovirus, vaccinia virus, reovirus, Coxsackievirus, parvovirus, Newcastle disease virus, vesicular stomatitis virus, measles virus, or infectious tobacco mosaic virus (TMV). In another embodiment, the vector is a non-viral vector. In a further embodiment, the vector is selected from the group of: liposomes, cationic lipid, micelles biocompatible polymers, including natural polymers and synthetic polymers; nanoparticles; lipoproteins; polypeptides; polysaccharides; lipopolysaccharides; metal particles; bacteria, bacteriophage, cosmid, plasmid, a yeast artificial chromosome, or fungal vectors. In yet a further embodiment, the plasmid is selected from the group of a pSIP609 L plantarum expression vector, a Pichia pastoris expression vector, or a mammalian expression vector. Non-limiting examples of such vectors that were used herein include the pSIP609 L plantarum expression vector (Sak-Ubol et al, 2016; PMID: 27176608) (disclosed as SEQ ID NO:174), a Pichia pastoris expression vector (SEQ ID NO:175), and a mammalian expression vector (pTT5, SEQ ID NO:173; FIG. 6C). In a further embodiment, provided is an expression vector further comprising a polynucleotide as disclosed herein. In yet a further embodiment, the vector comprises a nucleotide sequence of SEQ ID NO: 173 with the nucleotide residues between the restriction enzyme cut sites of EcoRI and HindIII in SEQ ID NO: 173 replaced with a polynucleotide as disclosed herein (such as a polynucleotide having a sequence selected from SEQ ID NOs: 68, 59, 58, 157, 159, 65 or 136) or an equivalent thereof that retains these mutated amino acids. In certain embodiments, the plasmid comprises a sequence selected from the group of SEQ ID NOs:173-175. In certain embodiments, the vector comprises a sequence of SEQ ID NO:210, 211 or a fragment thereof. In one embodiment, the plasmid is a pAd(dps)ΔCU-IRES-E1A having a sequence of SEQ ID NO:211 or a fragment thereof which further comprises a polynucleotide encoding a fusion protein as disclosed herein. In another embodiment, the plasmid is a pAdEasy-1 having a sequence of SEQ ID NO:210 or a fragment thereof which further comprises a polynucleotide encoding a fusion protein as disclosed herein. In a further embodiment, provided is an rAdV vector produced using one or more of the plasmids as disclosed herein.

[0269] In aspects where gene transfer is mediated by a DNA viral vector, such as an adenovirus (AdV), herpes simplex virus (HSV) or adeno-associated virus (AAV), the vector comprises a viral genome or a fragment thereof, and a polynucleotide encoding for a protein of interest, such as the albumin-PTEN protein fusions disclosed herein. In certain embodiments, the protein of interest comprises an amino acid sequence selected from SEQ ID NO: 14-30, 34-37, 49-50 and 109-132. In another embodiment, the polynucleotide comprises an N-terminal signal peptide coding sequence selected of [nt (1-63) of SEQ ID NO: 171 or SEQ ID NO: 180-192]. In yet another embodiment, the fusion protein lacks signal peptide but comprises an initiator methionine residue (optionally encoded by ATG) is placed at the N terminal of either albumin or PTEN, respectively, as appropriate. In another embodiment, the fusion protein lacks signal peptide but comprises an initiator methionine (optionally encoded by ATG) replacing the first residue of albumin (for example, a mature albumin, optionally via replacing the first three nucleotides of an albumin coding polynucleotide with ATG, and further optionally the albumin coding polynucleotide is selected from SEQ ID NO:176-179) or of PTEN [for example, a mature PTEN-L, optionally via replacing the first three nucleotides of a PTEN coding polynucleotide with ATG, and further optionally the PTEN coding polynucleotide is selected from SEQ ID NO:167 or nucleotide (nt) 64-nt 1728 of SEQ ID NO:171]. In another embodiment, the polynucleotide comprises one or more of SEQ ID NO:54-70, 74-77, or 135-160.

[0270] In certain embodiments, the recombinant viral vector (such as an oncolytic HSV virus, an AdV or an AdV that encodes more than one polypeptide (e.g., a double Ad vector) or any other vector as disclosed herein further comprises a polynucleotide encoding a fusion protein. In a further embodiment, the polynucleotide is selected from SEQ ID NO:54-70, 74-77, or 135-160. Additionally or alternatively, the vector comprises a polynucleotide encoding a further protein which comprises an amino acid sequence of an albumin and an amino acid sequence of a p53 protein. As used herein, the fusion protein comprising the amino acid sequences of albumin and p53 protein is referred to herein as an albumin-p53 protein. In a further embodiment, the polynucleotide encoding an albumin-p53 protein is selected from SEQ ID NO:78 or 161. In certain embodiments, the recombinant viral vector and/or any vector as described herein further comprises a polynucleotide encoding all or a portion of a heterologous protein or polypeptide. In one embodiment, the heterologous protein is heterologous to the vector. In a further embodiment, the heterologous protein is heterologous to the fusion protein, such as heterologous to human if the PTEN and/or albumin is a human one. In yet a further embodiment, the heterologous protein is a non-naturally occurring protein. In one embodiment, the heterologous protein comprises, or consists essentially of, or yet further consists of a PTEN or a fragment, analogue, variant, mutant, isoform or equivalent thereof. In one embodiment, the heterologous protein further comprises a signal peptide and/or a a detectable or purification marker. In one embodiment, the heterologous protein lacks an amino acid sequence of albumin. In a further embodiment, the heterologous protein comprises, or consists essentially of, or yet further consists of a PTEN-L or a fragment, analogue, variant, mutant, isoform or equivalent thereof. In yet a further embodiment, the heterologous protein comprises an amino acid sequence selected from SEQ ID NOs: 31 to 33 or a fragment, analogue, variant, mutant, isoform or equivalent of each. In one embodiment, the heterologous protein is encoded by a polynucleotide comprising a sequence selected from SEQ ID NOs: 71-73, 171-72, 166-167, 198-200, 204-206, a fragment thereof, or a polynucleotide at least 90% identical to SEQ ID NOs: 71-73, 171-72, 166-167, 198-200, 204-206 and encoding the same amino acid sequence as encoded by SEQ ID NOs: 71-73, 171-72, 166-167, 198-200, 204-206, respectively. In one embodiment, the heterologous protein can be used in treating a cancer, such as an antibody or a fragment thereof. In a further embodiment, the heterologous protein is a monoclonal antibody (mAb) or an equivalent thereof, including but not limited to: a mAb or an equivalent thereof recognizing and binding to VEGFR (such as Avastin™), or a mAb or an equivalent thereof recognizing and binding to HER2 (such as Herceptin™), or a mAb or an equivalent thereof recognizing and binding to EGFR (such as Erbitux™) or a mAb or an equivalent thereof that regulates immune checkpoints (also broadly known as “checkpoint antibody”), such as one recognizing and binding to CTLA4 [for example Yervoy™ (ipilimumab)], or one recognizing and binding to PD-1 [for example Keytruda™ (pembrolizumab) and Opdivo™ (nivolumab)], or one recognizing and binding to PD-L1 (for example, Tecentriq™ (atezolizumab)]. In another embodiment, the heterologous protein is selected from the group of Granulocyte-macrophage colony-stimulating factor (GM-CSF) or an equivalent thereof, an interleukin such as IL-2 or IL-15, or an interferon such IFNβ or IFNγ; or a natural bioactive peptide, such as thymosin A or adiponectin, or a synthetic peptide such as hexarelin. In one embodiment, the recombinant oncolytic HSV virus carries/comprises a polynucleotide encoding an albumin-PTEN fusion protein selected from the polynucleotides of SEQ ID NO:54-70, 74-77, 135-160 and a polynucleotide encoding a PTEN selected from the polynucleotides of SEQ ID NO:71-73, 171-172, 166-167, 198-200, 204-206. In a further embodiment, the recombinant oncolytic HSV virus carries/comprises a polynucleotide encoding an albumin-PTEN fusion protein selected from the polynucleotides of SEQ ID NO:54-70, 74-77, 135-160 and a polynucleotide encoding a PTEN selected from the polynucleotides of SEQ ID NO: 171-172, or 166-167. In yet a further embodiment, the oncolytic HSV vector further comprises a polynucleotide encoding a heterologous protein as described herein (a second transgene). In one embodiment, the oncolytic HSV vector further comprises an engineered polynucleotide sequence selected from SEQ ID NOs: 74 to 77 and 161, or a polynucleotide at least 90% identical to any one of SEQ ID NOs: 74 to 77 and 161 and encoding the same amino acid sequence as encoded by SEQ ID NOs: 74 to 77 and 161, respectively. In certain embodiments, the oncolytic HSV vector comprises, or alternatively consists essentially of, or yet further consists of one or more engineered polynucleotides selected from any polynucleotides as summarized in Table 1 and listed herein, or a polynucleotide sequence at least 90% identical thereto which encodes the same amino acid sequence.

[0271] In one embodiment, a recombinant Adenovirus vector (rAdV) is a non-replicating and non-disseminating AdV[(ΔE1A; ΔE1B; ΔE3)-AdV, wherein the E1A, E1B and E3 AdV proteins are all deleted, such that the viral vector can neither replicate in infected cells nor disseminate in other non-infected cells, thereby being efficacious and also very safe to apply in a subject]. In a further embodiment, the recombinant adenovirus vector comprises a polynucleotide of an albumin-PTEN fusion cDNA selected from the group of SEQ ID NO:58, 59, 68, 54-57, 60-67, 69-70, 74-77, 135-136, or 137-160. In a further embodiment, the recombinant adenovirus vector comprises two transgenes, as it is known in the art (Suzuki et al, 2015: PMID: 25588742), wherein one transgene comprises a polynucleotide of an albumin-PTEN fusion cDNA selected from the group of SEQ ID NO:58, 59, 68, 54-57, 60-67, 69-70, 74-77, 135-136, 137-160 and the second transgene comprises a polynucleotide of an albumin-p53 fusion cDNA selected from the group of SEQ ID NO:78 or 161. In certain embodiments, the rAdV vector is constructed by homologous recombination in bacteria using the AdEasy plasmid system, such as SEQ ID NO:210. In certain embodiments, a plasmid bearing the albumin-PTEN fusion cDNA is digested with Pad and transformed into HEK293 cells. In certain embodiments, the rAdV is plaque-purified in BMAd-E1, an A549 cell expressing the adenovirus E1 gene (described in Gilbert et al, 2014; PMID: 25159033). In certain embodiments, the rAdV is amplified using SF-BMAd-R cells (Gilbert et al, 2014; PMID: 25159033) and purified over cesium chloride gradients. In one embodiment, the titer of infectious particles is measured using tissue culture infectious dose 50% (TCID50%) assay. Additionally or alternatively, the ability of the cDNA selected from the group of SEQ ID NO:58, 59, 68, 54-57, 60-67, 69-70, 74-77, 135-136, 137-160 to drive expression of the corresponding PTEN-albumin fusion (SEQ ID NO: 18, 19, 28, 14-17, 20-27, 29-30, 34-37, 49-50 and 109-132, respectively) is investigated in the cell lysate and in the cell culture medium by western blots using anti-PTEN or anti-albumin antibodies (see, for example, FIG. 6B). In certain embodiments, the efficacy of the rAdV is assayed on cultured cancer cells or on a subject in need thereof, such as xenografted mice or human cancer patients. In one embodiment, a recombinant Adenovirus vector (rAdV) is a replicating (oncolytic) but non-disseminating rAdV [for example, (ΔE1A; ΔPS)-AdV, wherein the E1A protein and the AdV protease PS facilitating virus dissemination are deleted, such that the viral vector can replicate in infected cells but not disseminate in other non-infected cells, thereby being both very efficacious and very safe to apply in a subject]. In a further embodiment, the rAdV comprises an albumin-PTEN fusion cDNA selected from the group of SEQ ID NO:58, 59, 68, 54-57, 60-67, 69-70, 74-77, 135-136, 137-160. In yet a further embodiment, the rAdV vector is constructed by homologous recombination in bacteria using pAd(dps)ΔCU-IRES-E1A (Bourbeau et al, 2007; PMID: 17409449) (see, for example, SEQ ID NO:211). In one embodiment, a plasmid bearing the albumin-PTEN fusion cDNA is digested with Pad and transformed into HEK293A-CymR-PS cells [a HEK293A cell line that stably expresses the adenoviral protease under the control of the cumate repressor (Haq et al, 2019; PMID: 31506193 and references therein); it is noted cumR prevents synthesis of the foreign genes inserted in the AV vector, thereby reducing damage to the cells during production to enable higher rAdV yields; cumR can be derepressed upon addition of coumermycin in the cell medium]. In a further embodiment, the rAdV is then plaque-purified in BMAd-E1, an A549 cell expressing the adenovirus E1 gene (described in Gilbert et al, 2014; PMID: 25159033). In yet a further embodiment, the rAdV is amplified using SF-BMAd-PS cells [an A549 cell line expressing the adenovirus E1 gene; Gilbert et al, 2013; abstract #135; DOI: 10.1016/S1525-0016(16)34470-7] and purified over cesium chloride gradients. Additionally or alternatively, the titer of infectious particles is measured using tissue culture infectious dose 50% (TCID50%) assay. In a further embodiment, the ability of the transgene cDNA selected from the group of SEQ ID NO:58, 59, 68, 54-57, 60-67, 69-70, 74-77, 135-136, 137-160 to drive expression of the corresponding PTEN-albumin fusion (SEQ ID NO: 18, 19, 28, 14-17, 20-27, 29-30, 34-37, 49-50 and 109-132, respectively) is investigated in the cell lysate and in the cell culture medium by western blots using anti-PTEN or anti-albumin antibodies (see, for example, FIG. 6B). In yet a further embodiment, the efficacy of the rAdV is assayed on cultured cancer cells or on a subject in need thereof, such as xenografted mice or human cancer patients. In one embodiment, the rAdV is AdV5 (serotype 5). In another embodiment the rAdV is AdV3. In other embodiments, the rAdV is of mixed serotype such as AdV5/3, wherein each serotype is selected from the 50 serotypes of AdV, and in accordance with species infectivity in a subject. In yet a further embodiment, the AdV vector further comprises a polynucleotide encoding a heterologous protein as described herein (a second transgene). In one embodiment, the AdV vector further comprises an engineered polynucleotide sequence selected from SEQ ID NOs: 74 to 77 and 161, or a polynucleotide at least 90% identical to any one of SEQ ID NOs: 74 to 77 and 161 and encoding the same amino acid sequence as encoded by SEQ ID NOs: 74 to 77 and 161, respectively. In certain embodiments, the AdV vector comprises, or alternatively consists essentially of, or yet further consists of one or more engineered polynucleotides selected from any polynucleotides as summarized in Table 1 and listed herein, or a polynucleotide sequence at least 90% identical thereto which encodes the same amino acid sequence.

[0272] Other aspects of this disclosure relate to isolated cell comprising the polynucleotide and/or vectors as disclosed herein. Non-limiting examples of an isolated cell is a prokaryotic cell such as a bacteria cell, e.g., an E coli, or a eukaryotic cell. In another aspect, the isolated cell is a eukaryotic cell. In some embodiments the isolated eukaryotic cell is selected from an animal cell, a mammalian cell, a bovine cell, a feline cell, a simian, a canine cell, a murine cell, an equine cell or a human cell. In one aspect, the host cell is a Chinese Hamster Ovary (CHO) cell.

[0273] The polynucleotides, vectors and host cells are useful for the recombinant production of the fusion proteins. Further provided are the recombinant polypeptides produced by expressing the polynucleotide in host cell and growing the cell under conditions that favor the expression of the polynucleotide. In a further aspect, the recombinant fusion protein is isolated from the cell or culture media.

[0274] In a further aspect, the polypeptides, proteins, analogues, variants, fragments, vectors or host cells are detectably labeled or labeled with a purification marker.

[0275] In one aspect, the albumin-PTEN fusion protein is produced by a process comprising the step of culturing a host cell capable of expressing a polynucleotide encoding the albumin-PTEN fusion protein under conditions suitable for expression of the albumin-PTEN polynucleotide and optionally further comprising isolating the fusion protein produced by the cell from the cell culture or culture medium. The cell can be prokaryotic or a eukaryotic, such as a Chinese hamster ovary (CHO) cell.

[0276] In a further preferred embodiment, a fusion protein of the invention is processed by a host cell and secreted into the surrounding culture medium. Processing of the nascent fusion protein that occurs in the secretory pathways of the host used for expression may include, but is not limited to signal peptide cleavage; formation of disulfide bonds; proper folding; addition and processing of carbohydrates (such as for example, N- and O-linked glycosylation); specific proteolytic cleavages; and assembly into multimeric proteins. A fusion protein of the invention is preferably in the processed form. In a most preferred embodiment, the “processed form of a fusion protein” or “processed form of a pre-protein” or “mature protein” refers to a fusion protein product which has undergone N-terminal signal peptide cleavage, herein also referred to as a “mature fusion protein”. Examples of signal peptides are disclosed as SEQ ID NO:93-105.

[0277] Also provided is a recombinant polynucleotide comprising, or alternatively consisting essentially of, or yet further consisting of a polynucleotide encoding an albumin-PTEN fusion polypeptide and a polynucleotide encoding an anti-PD1 antibody, analog, derivative or PD1 binding fragment thereof. Non-limiting examples of polynucleotides that encode the anti-PD1 antibody include, without limitation, polynucleotides that encode pembrolizumab, nivolumab, sintilimab, tislelizumab, toripalimab, camrelizumab geptanolimab serplulimab zimberelimab cemiplimab, dostarlimab, prolgolimab, balstilimab, penpulimab, retifanlimab, cadonilimab, pucotenlimab, sasanlimab, or cetrelimab, as well as derivatives and analogs thereof.

[0278] In one aspect, the polynucleotide encoding the PD1 binding fragment of the anti-PD1 antibody comprises a polynucleotide encoding an scFv fragment of an anti-PD1 antibody selected from pembrolizumab, nivolumab, sintilimab, tislelizumab, toripalimab, camrelizumab geptanolimab serplulimab zimberelimab cemiplimab, dostarlimab, prolgolimab, balstilimab, penpulimab, retifanlimab, cadonilimab, pucotenlimab, sasanlimab, or cetrelimab, derivatives and analogs thereof. Non-limiting examples of such polynucleotides include SEQ ID NO:222 (nivolumab) and SEQ ID NO:235 (pembrolizumab).

[0279] The recombinant polynucleotides can be used for expression of the recombinant polynucleotide which in turn can be used as controls in the systems or methods as described herein.

[0280] The recombinant polynucleotide can further comprise a label, such as a detectable marker or a purification label. Exemplary labels are described herein.

[0281] Further provided is a vector comprising the polynucleotide for expression or replication of the polynucleotide. Non-limiting examples of vectors include plasmids, baculovirus, yeast or cosmid vectors, and viral vectors, such as adenoviral vectors, lentiviral vectors and adeno-associated viral vectors. Examples of such are known in the art and provided herein.

[0282] In a further aspect, the polynucleotide further comprises an oncolytic HSV that includes for example, oHSV1 or oHSV2, or varicella zoster virus, or Epstein-Barr virus, or human cytomegalovirus, or human herpesvirus 6A and 6B, Kaposi's sarcoma-associated herpesvirus or any appropriately modified of the 115 currently recognized herpesviridae species [International Committee on the Taxonomy of Viruses (ICTV; talk.ictvonline.org/taxonomy) and en.wikipedia.org/wiki/Herpesviridae; accessed both on Aug. 21, 2021]. A non-limiting example of an oHSV1 polynucleotide comprises, or consists essentially thereof, or consists of SEQ ID NO:242, or an equivalent thereof. An example of an oHSV2 is provided in SEQ ID NO:241 (see also FIG. 23D) or an equivalent thereof. The recombinant polynucleotide can further comprise a label, such as a detectable marker or a purification label. Exemplary labels are described herein.

[0283] In one aspect, the polynucleotides as described herein can be conjugated to a carrier, optionally a polymer, a dendrimer, an aptamer, a polymeric coating, a hydrogel, or a contained within a mesenchymal stem cell (MSC). Examples of such are provided herein.

[0284] Also provided is a host cell comprising a polynucleotide as disclosed herein. The cell can be a prokaryotic or a eukaryotic cell. Non-limiting examples of such are provided herein for replication and expression of the polynucleotides.

[0285] Further provided are compositions comprising, consisting essentially of, or consisting of a system as described herein. These are described herein.

### Compositions

[0286] Also provided are compositions comprising one or more of the fusion protein, polynucleotide, vector, host cell and a carrier, e.g., a pharmaceutically acceptable carrier. In one aspect, provided herein are pharmaceutical compositions comprising, or consisting essentially of, or yet further consisting of, the fusion protein (for example, the albumin-PTEN fusion protein) as disclosed herein, and at least one pharmaceutically acceptable carrier. The compositions optionally comprise an additional therapeutic agent, e.g., a chemotherapeutic agent. Thus, further provided are methods for inhibiting the growth of a cancer cell by contacting the cell with an effective amount of a fusion protein as disclosed herein. The contacting can be in vitro or in vivo. When practiced in vitro, the methods are useful to test for the effectiveness of the fusion polypeptide against a cancer, alone or in combination with other therapies. When practiced in vitro in an animal, the method provides a convenient animal model to test for effectiveness.

[0287] In certain embodiments, the composition further comprising a combined therapy. In one embodiment, the combined therapy is selected from the group of 1) natural bioactive peptides (thymosin A; adiponectin); 2) FDA and/or EMA-approved anti-cancer drugs that either are potentiated by PTEN or function via intact PTEN or for which loss of response (resistance) is correlated/driven by loss of PTEN, such as (a) Cytotoxics: cisplatin, doxorubicin, vinorelbin, melphalan; taxol; bromocriptine/artenusate, camptothecin; (b) Immunomodulatory: thalidomide; rapamycin, fingolimod/FTY20; (c) VEGF inhibitors: Sutent™, Avastin™; (d) Tyrosine Kinase Inhibitors: Tarceva™; Icotinib, imatinib, dasatinib; (e) HER2 mAbs: Herceptin™, (f) anti-EGFR mAbs, e.g. Erbitux™, (g) PD1/PD-L1 (“checkpoint”) mAbs: e.g. Yervoy™, Opdivo™ etc.; (f) PARP inhibitors: Glynparza™; (h) Emerging anti-cancer drug classes: BET inhibitors; (i) Anti-malarials: artesunate; (j) Anti-pain drugs: tramadol, lidocaine; (k) Anti-psychotic drugs: valproic acid; (1) Anti-metabolic syndrome drugs (now emerging as anti-cancerones as well): simvastatin, atorvastatin, metformin, resveratrol, catoptril, losartan, pioglitazone (m) Anti-inflammatory: celecoxib, aspirin, nimesulide, montelukast, diclofenac; (n) Anti-tape worm infections (niclosamide); (o) Antibiotics: docycyclin, alborixin; (p) Growth Hormone releasers: hexarelin; and (q) Botulimum toxin type A.

[0288] In one embodiment, the combined therapy is a purified protein drug. Non-limiting examples include a therapeutic mAb, a therapeutic protein [such as granulocyte-macrophage colony-stimulating factor (GM-CSF) or an equivalent thereof, an interleukin (such as IL-2 or IL-15), an interferon such as (IFNβ or IFNγ)], a natural bioactive peptide (such as thymosin A or adiponectin), or a synthetic peptide such as hexarelin or adiponectin. In a further embodiment, the therapeutic mAb is selected from the group of: a mAb or an equivalent thereof recognizing and binding to VEGFR (such as Avastin™), a mAb or an equivalent thereof recognizing and binding to HER2 (such as Herceptin™), a mAb or an equivalent thereof recognizing and binding to EGFR (such as Erbitux™), a mAb or an equivalent thereof that regulates immune checkpoints {such as one recognizing and binding to CTLA4 [for example Yervoy™ (ipilimumab)], or one recognizing and binding to PD-1 [for example Keytruda™ (pembrolizumab) and Opdivo™ (nivolumab)], or one recognizing and binding to PD-L1 (for example, Tecentriq™ (atezolizumab)]}.

[0289] In certain embodiments, the combined therapy is a small molecule drug, for example, a PARP inhibitor; a BET inhibitor, a chemotherapeutic drug, an anti-malarial, an anti-pain drug; an anti-psychotic drug, an anti-metabolic syndrome drugs (for example metformin); an anti-inflammatory drug, an anti-tape worm infection drug, an antibiotic, such as an antimicrobial; or botulimum toxin type A.

[0290] Briefly, pharmaceutical compositions of the present invention including but not limited to any one of the claimed compositions may comprise the fusion protein, or polynucleotide (for example, the optimized polynucleotide sequence encoding the fusion protein), vector, host cell and a carrier as described herein, in combination with one or more pharmaceutically or physiologically acceptable carriers, diluents or excipients. Such compositions may comprise buffers such as neutral buffered saline, phosphate buffered saline and the like; carbohydrates such as glucose, mannose, sucrose or dextrans, mannitol; proteins; polypeptides or amino acids such as glycine; antioxidants; chelating agents such as EDTA or glutathione; adjuvants (e.g., aluminum hydroxide); stabilizers, and preservatives. Compositions of the present disclosure may be formulated for oral, intravenous, topical, enteral, intra-tumoral and/or parenteral administration. In certain embodiments, the compositions of the present disclosure are formulated for intravenous administration.

[0291] Also provided herein are formulations comprising one or more of the polynucleotides, polypeptides, systems or cells as provided herein. In one aspect, the combination of the systems and/or the albumin-PTEN fusions and immune checkpoint inhibitors can be formulated in compositions. Optionally, the compositions can comprise one or more additional therapeutic agents, such as the third therapeutic agents described below. The compositions will usually be supplied as part of a sterile, pharmaceutical composition that will normally include a pharmaceutically acceptable carrier and/or excipient. In another aspect, this disclosure provides a pharmaceutical composition comprising an oncolytic viral vector such as oHSV2-PR61, an immune checkpoint inhibitor, and a pharmaceutical acceptable vehicle and/or an excipient.

[0292] This composition can be in any suitable form (depending upon the desired method of administering it to a patient). As used herein, “administering” for any composition, formulation or element thereof, is meant a method of giving a dosage of a compound (e.g., oncolytic viral vector such as oHSV2-PR61 and/or an immune checkpoint inhibitor, as described above) or a composition (e.g., a pharmaceutical composition, e.g., a pharmaceutical composition containing an albumin-PTEN fusion and/or an immune checkpoint inhibitor, as described above) to a subject. The compositions utilized in the methods described herein can be administered, for example, intravitreally (e.g., by intravitreal injection), by eye drop, intramuscularly, intravenously, intradermally, percutaneously, intraarterially, intraperitoneally, intralesionally, intracranially, intraarticularly, intraprostatically, intrapleurally, intratracheally, intrathecally, intranasally, intravaginally, intrarectally, topically, intratumorally, peritoneally, subcutaneously, subconjunctivally, intravesicularly, mucosally, intrapericardially, intraumbilically, intraocularly, intraorbitally, orally, topically, transdermally, by inhalation, by injection, by implantation, by infusion, by continuous infusion, by localized perfusion bathing target cells directly, by catheter, by lavage, in cremes, or in lipid compositions. The compositions utilized in the methods described herein can also be administered systemically or locally. The method of administration can vary depending on various factors (e.g., the compound or composition being administered, and the severity of the condition, disease, or disorder being treated). The most suitable route for administration in any given case will depend on the polynucleotide, polypeptide, cell, or oncolytic viral vector and particular antibody, the subject, and the nature and severity of the disease and the physical condition of the subject.

[0293] Pharmaceutical compositions can be conveniently presented in unit dose forms containing a predetermined amount of, for example, an oncolytic viral vector such as oHSV2-PR61 and/or an immune checkpoint inhibitor per dose. Pharmaceutically acceptable carriers for use in the disclosure can take a wide variety of forms depending, e.g., on the condition to be treated or route of administration.

[0294] Pharmaceutical compositions of the disclosure can be prepared for storage as lyophilized formulations or aqueous solutions. In one aspect, they are prepared by mixing the components, e.g., the oncolytic viral vector such as oHSV2-PR61 having the desired degree of purity with optional pharmaceutically-acceptable carriers, excipients or stabilizers typically employed in the art (all of which are referred to herein as “carriers”), i.e., buffering agents, stabilizing agents, preservatives, isotonifiers, non-ionic detergents, antioxidants, and other miscellaneous additives. Such additives must be nontoxic to the recipients at the dosages and concentrations employed. See for example, WO 2020/140012 A1.

[0295] Buffering agents help to maintain the pH in the range which approximates physiological conditions. They can be present at concentration ranging from about 2 mM to about 50 mM. Suitable buffering agents for use with the present disclosure include both organic and inorganic acids and salts thereof such as citrate buffers (e.g., monosodium citrate-disodium citrate mixture, citric acid-trisodium citrate mixture, citric acid-monosodium citrate mixture, etc.), succinate buffers (e.g., succinic acid-monosodium succinate mixture, succinic acid-sodium hydroxide mixture, succinic acid-disodium succinate mixture, etc.), tartrate buffers (e.g., tartaric acid-sodium tartrate mixture, tartaric acid-potassium tartrate mixture, tartaric acid-sodium hydroxide mixture, etc.), fumarate buffers (e.g., fumaric acid-monosodium fumarate mixture, fumaric acid-disodium fumarate mixture, monosodium fumarate-disodium fumarate mixture, etc.), gluconate buffers (e.g., gluconic acid-sodium glyconate mixture, gluconic acid-sodium hydroxide mixture, gluconic acid-potassium glyuconate mixture, etc.), oxalate buffer (e.g., oxalic acid-sodium oxalate mixture, oxalic acid-sodium hydroxide mixture, oxalic acid-potassium oxalate mixture, etc.), lactate buffers (e.g., lactic acid-sodium lactate mixture, lactic acid-sodium hydroxide mixture, lactic acid-potassium lactate mixture, etc.) and acetate buffers (e.g., acetic acid-sodium acetate mixture, acetic acid-sodium hydroxide mixture, etc.). Additionally, phosphate buffers, histidine buffers and trimethylamine salts such as Tris can be used.

[0296] Preservatives can be added to retard microbial growth, and can be added in amounts ranging from 0.2%-1% (w/v). Suitable preservatives for use with the present disclosure include phenol, benzyl alcohol, meta-cresol, methyl paraben, propyl paraben, octadecyldimethylbenzyl ammonium chloride, benzalconium halides (e.g., chloride, bromide, and iodide), hexamethonium chloride, and alkyl parabens such as methyl or propyl paraben, catechol, resorcinol, cyclohexanol, and 3-pentanol. Isotonicifiers sometimes known as “stabilizers” can be added to ensure isotonicity of liquid compositions of the present disclosure and include polyhydric sugar alcohols, for example trihydric or higher sugar alcohols, such as glycerin, erythritol, arabitol, xylitol, sorbitol and mannitol. Stabilizers refer to a broad category of excipients which can range in function from a bulking agent to an additive which solubilizes the therapeutic agent or helps to prevent denaturation or adherence to the container wall. Typical stabilizers can be polyhydric sugar alcohols (enumerated above); amino acids such as arginine, lysine, glycine, glutamine, asparagine, histidine, alanine, ornithine, L-leucine, 2-phenylalanine, glutamic acid, threonine, etc., organic sugars or sugar alcohols, such as lactose, trehalose, stachyose, mannitol, sorbitol, xylitol, ribitol, myoinisitol, galactitol, glycerol and the like, including cyclitols such as inositol; polyethylene glycol; amino acid polymers; sulfur containing reducing agents, such as urea, glutathione, thioctic acid, sodium thioglycolate, thioglycerol, α-monothioglycerol and sodium thio sulfate; low molecular weight polypeptides (e.g., peptides of 10 residues or fewer); proteins such as human serum albumin, bovine serum albumin, gelatin or immunoglobulins; hydrophylic polymers, such as polyvinylpyrrolidone monosaccharides, such as xylose, mannose, fructose, glucose; disaccharides such as lactose, maltose, sucrose and trisaccacharides such as raffinose; and polysaccharides such as dextran. Stabilizers can be present in the range from 0.1 to 10,000 weights per part of weight active protein.

[0297] Non-ionic surfactants or detergents (also known as “wetting agents”) can be added to help solubilize the therapeutic agent as well as to protect the therapeutic protein against agitation-induced aggregation, which also permits the formulation to be exposed to shear surface stressed without causing denaturation of the protein. Suitable non-ionic surfactants include polysorbates (20, 80, etc.), polyoxamers (184, 188, etc.), Pluronic polyols, polyoxyethylene sorbitan monoethers (TWEEN®-20, TWEEN®-80, etc.). Non-ionic surfactants can be present in a range of about 0.05 mg/ml to about 1.0 mg/ml, for example about 0.07 mg/ml to about 0.2 mg/ml.

[0298] Additional miscellaneous excipients include bulking agents (e.g., starch), chelating agents (e.g., EDTA), antioxidants (e.g., ascorbic acid, methionine, vitamin E), and cosolvents. See for example, WO 2020/140012 A1.

[0299] The polynucleotides, polypeptides, vectors, cells and systems comprising for example, albumin-PTEN fusions and immune checkpoint inhibitor combination therapy can be further combined with viral particle delivery potentiators. Polymeric nanocups such as the FDA-approved ultrasound contrast agent Sonovue (Bracco International) and the gas-stabilizing nanoscale SonoTran Particles (OxSonics Ltd., UK) are preferred delivery potentiators. These polymeric agents can be administered by i.v. injection to a subject, preferably together with the albumin-PTEN virus also administered by i.v. injection, and then subjected to focused ultra-sound mediated activation, wherein the polymeric agents increase in volume and open parodic cavities in the tumoral tissue, thereby facilitating increased delivery of the oncolytic virus into the tumor, which leads to higher treatment efficacy in the absence of toxicity. Moreover, the SonoTran platform allows for ultrasound-mediated imaging of the tumor tissue in vivo, thereby linking treatment to a clinically relevant biomarker. The SonoTran platform has been shown to facilitate delivery of both large oncolytic viruses such as a recombinant vaccinia virus and antibodies (Grundy et al, 2021: PMID: 33426913).

[0300] In one embodiment, the polynucleotides, polypeptides, vectors, cells and systems comprising for example oncolytic virus expressing an albumin-PTEN is combined with Sonovue particles.

[0301] In another embodiment, the polynucleotides, polypeptides, vectors, cells and systems comprising for example oncolytic virus expressing an albumin-PTEN is combined with SonoTran particles and imaged via acoustic ultrasounds.

[0302] In one embodiment, the subject receives the polynucleotides, polypeptides, vectors, cells and systems comprising for example albumin-PTEN virotherapy and SonoTran particles as co-administered i.v. and imaged via ultrasounds. In another embodiment, SonoTran treatment is combined with an albumin-PTEN virus containing a single payload gene, namely SEQ ID NO:226. In another embodiment, SonoTran treatment is combined with an albumin-PTEN virus containing a double payload gene, namely SEQ ID NO:226 and SEQ ID NO:222. In another embodiment, SonoTran treatment is combined with an albumin-PTEN virus containing a double payload gene, namely SEQ ID NO:226 and SEQ ID NO:222, wherein the latter cDNA is expressed under the control of the ULp38 promoter (SEQ ID NO:234).

[0303] The oncolytic viral vector expressing albumin-PTEN fusion and immune checkpoint inhibitor combinations disclosed herein can also be combined with other therapeutic antibodies such as, for example, but not by way of limitation, an anti-EGFR (EGF receptor) monoclonal antibody or an anti-VEGF monoclonal antibody. Specific examples of anti-EGFR antibodies include cetuximab and panitumumab. A non-limiting example of an anti-VEGF antibody is bevacizumab.

[0304] The oncolytic HSV albumin-PTEN viruses disclosed herein can be further conjugated to polymers, such as dendrimers, aptamers, polymeric coatings, polyethylenoglycol, hydrogels and the like. Without being bound by theory, these materials protect the virus from the neutralizing activity of the immune system, thereby allowing for and/or enhanced expression of the viral payload upon intravenous delivery. See for example Kaygisiz & Synatschke, 2020: PMID: 33025967.

[0305] In other embodiments, the oncolytic HSV albumin-PTEN viruses disclosed herein can be loaded on mesenchymal stem cells (MSCs). Mesenchymal stem cells are immature cells capable of self-renewing and differentiating into many cell types that belong to three germinal layers. Due to their inherent tumor tropism mesenchymal stem cells loaded with oncolytic virus can improve delivery of the therapeutic cargo to cancer sites. Shielding of oncolytic viral construct from antiviral host immune response makes these cells prospective delivery vehicles to even hard-to-reach metastatic neoplastic foci. As a non-limiting example, an oHSV1-PTEN-L virus was loaded on MSCs to treat brain and breast cancer (see WO/2021/024207 A1).

### Methods of Use

[0306] Aspects of the disclosure relate to a method of inhibiting the growth of a cancer cell (or a tumor expressing a cancer or tumor antigen), by contacting the tumor with an effective amount of the fusion protein, polynucleotide (for example, those encoding a fusion protein and/or a transgene), vector, or compositions disclosed above. The contacting can be in vitro, ex vivo or in vivo. When the contacting is in vitro or ex vivo, the method can be used to test personalized therapy against a patient's tumor or cancer or to assay for combination therapies. When the contacting is in vivo, the method is useful to inhibit the growth of the tumor or cancer cell in a subject in need thereof, such as a human patient suffering from cancer and the patient receives an effective amount of the fusion protein, polynucleotide (for example, those encoding for the fusion protein), or vector. In certain embodiments, the tumor is a solid tumor. An effective amount is administered alone or in combination with other therapies as described herein. In certain embodiments, the cancer/tumor targeted is a solid tumor or a cancer affecting the blood and/or bone marrow, e.g., multiple myeloma (MM). In another aspect, the method further comprises, or consists essentially of, or yet further consists of, administering to the subject an effective amount of a cytoreductive therapy. The therapy can be a first line, second line, third line etc. and will be administered by a method to deliver an effective amount of the fusion protein, polynucleotide, or vector to the cell or tumor.

[0307] Administration of one or more of the proteins, polynucleotides, vectors or compositions can be effected in one dose, continuously or intermittently throughout the course of treatment. Methods of determining the most effective means and dosage of administration are known to those of skill in the art and will vary with the composition used for therapy, the purpose of the therapy and the subject being treated. Single or multiple administrations can be carried out with the dose level and pattern being selected by the treating physician. Suitable dosage formulations and methods of administering the agents are known in the art. In a further aspect, the fusion protein and composition of the invention can be administered in combination with one or more of other treatments, including but not limited to: 1) natural bioactive peptides (thymosin A; adiponectin); 2) FDA and/or EMA-approved anti-cancer drugs that either are potentiated by PTEN or function via intact PTEN or for which loss of response (resistance) is correlated/driven by loss of PTEN, such as (a) Cytotoxics: cisplatin, doxorubicin, vinorelbin, melphalan; taxol; bromocriptine/artenusate, camptothecin; (b) Immunomodulatory: thalidomide; rapamycin, fingolimod/FTY20; (c) VEGF inhibitors: Sutent™, Avastin™; (d) Tyrosine Kinase Inhibitors: Tarceva™; Icotinib, imatinib, dasatinib; (e) HER2 mAbs: Herceptin™, (f) anti-EGFR mAbs, e.g. Erbitux™ (g) PD1/PD-L1 (“checkpoint”) mAbs: e.g. Yervoy™, Opdivo™ etc.; (f) PARP inhibitors: Glynparza™; (h) Emerging anti-cancer drug classes: BET inhibitors; (i) Anti-malarials: artesunate; (j) Anti-pain drugs: tramadol, lidocaine; (k) Anti-psychotic drugs: valproic acid; (1) Anti-metabolic syndrome drugs (now emerging as anti-cancerones as well): simvastatin, atorvastatin, metformin, resveratrol, catoptril, losartan, pioglitazone (m) Anti-inflammatory: celecoxib, aspirin, nimesulide, montelukast, diclofenac; (n) Anti-tape worm infections (niclosamide); (o) Antibiotics: docycyclin, alborixin; (p) Growth Hormone releasers: hexarelin; and (q) Botulimum toxin type A. A string of studies have shown that both animal models and human patients treated with checkpoint mAbs develop resistance to these agents when the PTEN tumor suppressor is functionally inactivated in tumor cells. It is widely accepted that functional PTEN tumor suppressor maintains tumors in a relatively “hot” configuration (i.e., tumors are visible to the immune system and are attacked by it), whereas loss of PTEN renders tumors “cold”, wherein the immune system is inactivated or anergic (reviewed in Chen & Eng, 2019; PMID: 30928438). In fact, Chen & Eng, 2019; PMID: 30928438 state that PTEN is anticipated to synergize with checkpoint mAbs. Consistently, when PTEN-L is delivered via an HSV1 viral vector into mice with glioblastoma (GBM) (a cold brain tumor), the levels of PD-L1 are significantly reduced and the mice survive for ultra-long periods of time, (Russell et al, 2018; PMID: 30479334). Because the PTEN-albumin fusions disclosed herein are equivalent to PTEN-L with respect to tumor suppressor function, in view of Russell et al, 2018; PMID: 30479334 and Chen & Eng, 2019; PMID: 30928438, it is anticipated that PTEN-albumin fusions synergize with checkpoint antibodies to treat tumors or cancer in a subject, wherein the said fusions reduce the levels of PD-L1 in the tumor/cancer and/or reduce the levels of checkpoint mAb normally required to treat the tumor/cancer in the subject.

[0308] In certain embodiments, the recombinant viral vector or any other vector as described herein is further combined with another therapy, such as a purified protein drug. Non-limiting examples include a therapeutic mAb (for example Avastin™, Herceptin™ Yervoy™ Keytruda™, Opdivo™, Tecentriq™ etc.), or a therapeutic protein, such as GM-CSF, an interleukin, an interferon, thymosin A, hexarelin or adiponectin. In certain embodiments, the combined therapy is a small molecule drug, for example, a PARP inhibitor; a BET inhibitor, a chemotherapeutic drug, an anti-malarial, an anti-pain drug; an anti-psychotic drug, an anti-metabolic syndrome drugs (for example metformin); an anti-inflammatory drug, an anti-tape worm infection drug, an antibiotic, such as an antimicrobial; or botulinum toxin type A. In one embodiment, the combined treatment comprises administrating a fusion protein and/or a vector as disclosed herein and a combined therapy concurrently, sequentially and/or separately to a subject in need thereof. In one embodiment the fusion protein, vector and combined therapy are administrated to the subject via the same administration route. In another embodiment, different administration route is used. In certain embodiments, there is an about 0.5 hour, about 1 hour, about 2 hours, about 3 hours, about 4 hours, about 5 hours, about 6 hours, about 7 hours, about 8 hours, about 12 hours, about 1 day, about 2 days, about 3 days, about 4 days, about 5 days, about 6 days, about 1 week, about 2 weeks or about 1 months gap in any of the two administrations.

[0309] In certain embodiments, any combination therapy as described herein achieves a synergistic effects in treating a disease, such as a cancer.

[0310] Also provided is a method of treating a cancer, comprising administering an effective amount of one or more of a fusion protein, a polynucleotide, a vector, or a pharmaceutical composition as described herein to a subject in need thereof. In one embodiment, the method comprise administering an effective amount of a fusion protein and a polynucleotide or a vector as described herein. In a further embodiment, the method further comprises administering an effective amount of a combined treatment, whereby a synergistic effect is achieved in treating cancer.

[0311] Additionally provided is a method for delivering a fusion protein, a polynucleotide (for example, those encoding a fusion protein), a vector, or a pharmaceutical composition as described herein to a subject in need thereof. In certain embodiments, the fusion protein, polynucleotide or vector is delivered to the extracellular matrix (ECM) of a cancer of the subject.

[0312] In one embodiment, the subject is suspected of having and/or is diagnosed with a cancer or a disease associated with low expression or lacking expression of a PTEN.

[0313] Additionally or alternatively, the subject has a high expression level of a miRNA targeting the 3′ of the PTEN tumor suppressor mRNA compared to a control. In one embodiment, the control is a biological sample from a subject who is free of any cancer or tumor. In another embodiment, the control is a biological sample from a healthy subject. In yet another embodiment, the control is any other cancer or tumor. A non-limiting example of the miRNA is miR-21, any other onco-miR(s) or any combination thereof. In one embodiment, the expression level of the miRNA is detected in a liquid biological sample (such as a liquid biopsy) of the subject. Such a sample includes, but is not limited to, blood, serum or plasma. In a further embodiment, efficacy of a fusion protein, polynucleotide, vector, composition, and/or method as disclosed herein is monitored and/or accessed via detecting the expression of a miRNA. Non-limiting examples of a desired efficacy include a successful treatment of a cancer in a subject, inhibition of a cancer cell growth or metastasis in vivo, ex vivo or in vitro, PTEN increase in a cancer at the mRNA and/or protein level, and/or increase of a PTEN protein or a PTEN polypeptide fragment in a peri-cancerous area. In one embodiment, a decreased expression of miR-21, any other onco-miR(s) or any combination thereof indicates a desired efficacy, optionally using one or more of the primers having a nucleotide sequences of SEQ ID NO:206-208.

[0314] In one embodiment, the cancer is a solid tumor (e.g., carcinoma or sarcoma) or a non-solid cancer (for example, a blood cancer). Additionally or alternatively, the cancer or tumor is a primary or metastatic cancer or tumor. In a further embodiment, the cancer is selected from a gastric cancer, a colorectal cancer, a prostate cancer, a breast cancer, a triple negative breast cancer, an ovarian carcinoma, a renal cell carcinoma, an Ewing sarcoma, a melanoma, a mesothelioma, a lung cancer, a non-small cell lung cancer, a stage IV lung cancer, a brain cancer, a glioblastoma, a lymphoma, a leukemia, or a multiple myeloma (MM). In another embodiment, the cancer affects the blood and/or bone marrow.

[0315] In one embodiment, the cancer lacks expression (or has a low expression level) of a PTEN protein. In a further embodiment, the cancer has a modified Histopathology score (H score) for PTEN of about 20 or lower. An H score has been used by one of skill in the art in quantifying expression of a certain protein in immunohistochemistry and related fields. In one embodiment, the H score of PTEN expression is calculated as the product of the percentage of cells staining at an established intensity (0=no staining, 1+=intermediate/decreased, 2+=full) relative to the internal positive control giving a product ranging from 0 to 200 as an H score, wherein the staining intensity of the IHC sample is evaluated blindly by at least two independent pathologists (Sangale et al, 2011; PMID: 20930614). In a further embodiment, the internal positive control is an endothelium or tumor stroma, set at 2+. In another embodiment, the PTEN IHC uses the SP218 or the 138G6 mAbs (see FIG. 6B). In another embodiment, the PTEN IHC method is validated by an independent party, including a contract research organization which is preferably certified by a notified body, or has Clinical Laboratory Improvement Amendments (CLIA) or College of American Pathologists (CAP) certification. In another embodiment, PTEN IHC staining intensity is computer assisted (Rulle et al, 2018; PMID: 30240851). In another aspect, PTEN IHC is combined with flow cytometry (“histo-cytometry”) so as to facilitate multiplex quantitative tissue imaging analysis & biomarker-related phenotyping of the immune cells (“immunophenotyping”) within the patient tumor tissue IHC, in line with the pivotal role played by PTEN proteins, including PTEN-L, in the regulation of the immune system (Russell et al, PMID: 30479334). In yet a further embodiment, the cancer or tumor comprises a dysfunctional/inactive PTEN, the function of which can be measured in an in vitro or ex vivo assay such as the Malachite Green phosphatase assay, or an in vivo assay such as an assay measuring cell penetration in a mammalian cell or another cell-based assay measuring tumor suppressor function, including the activation of cell death, as is known in the art or described herein.

[0316] In one embodiment, the cancer or tumor comprises an increased pi3K pathway pharmacodynamics biomarkers compared to a control. In a further embodiment, the control is a biological sample from a subject who is free of any cancer or tumor. Or, the control is a biological sample from another cancer or tumor. The biomarker(s) is selected from the group of: AKT Serine/Threonine Kinase (AKT), phosphorylated proline-rich Akt substrate of 40 kDa (pPRAS40), pGSK3 (glycogen synthase kinase 3), pFOXO (Forkhead family of transcription factors) or phosphorylated Ribosomal Protein S6 Kinase B1 (pS6K)

[0317] Any of the methods as disclosed herein further comprise monitoring efficacy prior to, concurrently with, and/or after performing the method or any step(s) recited in the method. In one embodiment, the efficacy is evaluated and/or quantified as a treatment of a disease (for instance a cancer) in a subject, an inhibition of a cancer cell growth, and/or a biomarker change.

[0318] The biomarker change as used herein may refer to an expression change of a cancer cell marker (such as an onco-miR, and/or a pi3K pathway pharmacodynamics biomarker), and/or an expression change of a molecule (for example a polynucleotide or a polypeptide) lack in a cancer cell or expressed at a low level in a cancer cell compared to a control (such as a PTEN). In one embodiment, a desired efficacy is observed after performing a method as disclosed herein.

[0319] In another embodiment, both efficacy outcomes and PD biomarker can be simultaneously determined in the cancer or tumor in a subject. In a non-limiting example, a rodent bearing a human tumor xenograft is used. Human tumor cells, preferably engineered to express a bioluminescent gene, such as Luciferase, are transplanted into a rodent (such as a mice or a rat), allowing visualization by injection of an activatable fluorescence optical imaging agent in the rodent. A suitable tumor cell includes but is not limited to 4T1-Luc mouse breast cancer cell line while the agent may be selected from: MMPSense 645 FAST (catalog #NEV11112), Cat B680 FAST (catalog #NEV 10126) and similar agents (FAST platform, PerkinElmer, Waltham, MA). In one embodiment, the optical imaging agent is sensitive to and activatable by proteases such as MMP2/9, Cathepsin B and other cancer-associated proteases, which are in much higher concentrations in the peri-cancerous areas as opposed to normal tissues, thereby allowing for quantitative & multi-channel measurement of protease action in the subject at the desired wavelength (e.g. 645 nm, 680 nm, 750 nm), and for correlation of the quantified fluorescence to cancer progression and pathologic response, wherein the latter is independently quantified by Luciferase activity in the same tumor nodule of the subject and at the same time.

[0320] In another embodiment, a subject with cancer and under treatment with an anti-cancer drug can be further treated with a properly labeled version of the same anti-cancer agent, including a near-infrared fluorescent agent-mediated labeling and/or a cancer protease-activatable probe, and then live-imaged with non-invasive optical imaging at two or more wavelengths, thereby simultaneously visualizing & quantifying distribution of the drug in the tumor and other parts of the subject and protease action as a function of time. In certain embodiments, the subject can be an animal, such as a rodent, or preferably a rat, or even more preferably a mouse. In certain embodiments, the subject may or may not have cancer. In certain embodiments, the subject may be a rat or a mouse bearing a tumor allograft, wherein the grafted tumor is from the same species (syngeneic tumor) or other species, such as human (allogeneic tumor). In certain embodiments, the tumor may be from an established cell line (CDX grafts) or from a freshly-derived patient biopsy tissue (PDX graft). In certain embodiments, the tumor maybe excised from the subject following imaging and processed for IHC, flow cytometry, immunophenotyping and other techniques, thereby correlating drug biodistribution/imaging in the subject with (pre)clinical response to therapy and morphological, anatomical, subcellular and molecular attributes such as pharmacodynamic or imaging biomarkers.

[0321] In some embodiments, a biomarker is prognostic of disease outcome, i.e. inform on the general course and outcome of the disease regardless of subject treatment. Such prognostic biomarkers are typically selected from IHC antigen cohorts and can be cytokeratins, vimentin, cell-adhesion molecules, oncogenes, tumor suppressors, and many others, as is known in the art or described herein. In other embodiments, these biomarkers are predictive of disease outcome in response to a specific drug, such as the albumin-PTEN fusions claimed herein. As a non-limiting example, and without being bound by theory, because PTEN protein levels correlate with tumor outcome, whereas an onco-miR (such as miR-21) also inversely correlate with both PTEN levels and subject overall survival, an onco-miR predicts treatment outcome (predictive biomarker) in a subject dosed with an albumin-PTEN composition selected of: a purified albumin-PTEN protein preparation for subject use, a gene therapy preparation comprising a polynucleotide encoding for an albumin-PTEN protein, mRNA therapy comprising a polynucleotide encoding for an albumin-PTEN protein, combinations thereof and/or combinations of each thereof, or combinations of each thereof with other treatments, as is known in the art of described herein. In one embodiment, measurement of the onco-miR predictive biomarker is performed in subject blood (liquid biopsy). In another embodiment, the onco-miR predictive biomarker is determined in a tissue extract, preferably a cancer tissue extract. In another embodiment, the onco-miR predictive biomarker has an accuracy of 70% or 75% or 80% or even higher. In another embodiment, the onco-miR levels are measured by RT-PCR using total RNA extracted from the serum portion of venous blood of cancer patients and non-cancer volunteers, using the RT primer of SEQ ID NO:207 and PCR primers with SEQ ID NO:208-209.

### Methods of Production and Compositions Thereof

[0322] Also provided is a method of producing a fusion protein/polypeptide as described herein. The method comprises culturing a host cell capable of expressing the fusion protein under conditions suitable for expression of the fusion protein.

[0323] In one embodiment, the host cell is a prokaryotic cell or a eukaryotic cell. In a further embodiment, the host cell is a mammalian cell. Additionally or alternatively, the host cell is a cell line. In yet a further embodiment, the host cell is selected from the group of a Chinese hamster ovary (CHO) cell, or a HEK293 cell. In one embodiment, the CHO cell is a CHO-3E7 cell having an ExPASy accession number of CVCL_JY74. In another embodiment, the HEK293 cell is aHEK293-EBNA1-6E having an ExPASy accession number of CVCL_HF20. Suitable conditions for culturing the host cell and/or expression of the fusion protein can be found, for example, at www.atcc.org/en/Guides.aspx. In one embodiment, the host cell is a natural furin knock-out (KO) cell or cell line. In a further embodiment, the host cell is a colorectal cancer cell. In yet a further embodiment, the host cell is a LoVo cell. See, for example, Susan-Resiga et al. 2011, PMID: 21550985.

[0324] In certain embodiments, the host cell lacks (or has a low level of) expression of a protease which is able to cleave the fusion protein. In one embodiment, the protease is an intracellular protease or a protease present in a peri-cancerous cell or tissue. In a further embodiment, the protease is selected from the group of furin, MMP2/9 or Cathepsin B.

[0325] In one embodiment, the protease is selected from the group of ADAMS, ADAMS, ADAM10, ADAM12, ADAM15, ADAM17/TACE, ADAMDEC1, ADAMTS1, ADAMTS4, ADAMTS5, Aspartate proteases, e.g., BACE, Renin, Aspartic cathepsins, e.g., Cathepsin D, Cathepsin E, Caspases, e.g., Caspase 1, Caspase 2, Caspase 3, Caspase 4, Caspase 5, Caspase 6, Caspase 7, Caspase 8, Caspase 9, Caspase 10, Caspase 14, Cysteine cathepsins, e.g., Cathepsin B, Cathepsin C, Cathepsin K, Cathepsin L, Cathepsin S, Cathepsin V/L2, Cathepsin X/Z/P, Cysteine proteinases, e.g., Cruzipain, Legumain, Otubain-2, KLKs, e.g., KLK4, KLK5, KLK6, KLK7, KLK8, KLK10, KLK11, KLK13, KLK14, Metallo proteinases, e.g., Meprin, Neprilysin, PSMA, BMP-1, MMPs, e.g., MMP1, MMP3, MMP7, MMP8, MMP10, MMP11, MMP12, MMP13, MMP14, MMP15, MMP16, MMP17, MMP19, MMP20, MMP23, MMP24, MMP26, MMP27, Serine proteases, e.g., activated protein C, Cathepsin A, Cathepsin G, Chymase, coagulation factor proteases, (e.g., FVIIa, FIXa, FXa, FXIa, FXIIa), Elastase, Granzyme B, Guanidinobenzoatase, HtrA1, Human Neutrophil Elastase, Lactoferrin, Marapsin, NS3/4A, PACE4, Plasmin, PSA, tPA, Thrombin, Tryptase, uPA, Type II Transmembrane, Serine Proteases (TTSPs), e.g., DESC1, DPP-4, FAP, Hepsin, Matriptase-2, MT-SP1/Matriptase, TMPRSS2, TMPRSS3 or TMPRSS4.

[0326] Additionally, the method further comprises purifying or isolating the fusion protein optionally from the cell or cell culture medium. In one embodiment, the purification and/or isolation step comprises lysing host cells to release the fusion protein expressed. In another embodiment, the purification and/or isolation step does not involve lysing host cells, instead, the fusion protein is secreted outside of the host cells. In one embodiment, after or during the culture, supernatant of host cells and/or the cell culture medium comprises about 1 μg/ml, about 2 μg/ml, about 3 μg/ml, about 4 μg/ml, about 5 μg/ml, about 10 μg/ml, about 15 μg/ml, about 20 μg/ml, about 25 μg/ml, about 30 μg/ml, about 40 μg/ml, about 50 μg/ml, about 100 μg/m, more than about 1 μg/ml, more than about 2 μg/ml, more than about 3 μg/ml, more than about 4 μg/ml, more than about 5 μg/ml, more than about 10 μg/ml, more than about 15 μg/ml, more than about 20 μg/ml, more than about 25 μg/ml, more than about 30 μg/ml, more than about 40 μg/ml, more than about 50 μg/ml, more than about 100 μg/ml, about 1 μg/ml to about 100 μg/ml, about 1 μg/ml to about 50 μg/ml, about 1 μg/ml to about 25 μg/ml, about 1 μg/ml to about 20 μg/ml, about 1 μg/ml to about 15 μg/ml, about 1 to about 10 μg/ml, about 1 to about 5 μg/ml, about 5 μg/ml to about 100 μg/ml, about 5 μg/ml to about 50 μg/ml, about 5 μg/ml to about 25 μg/ml, about 5 μg/ml to about 20 μg/ml, about 5 μg/ml to about 15 μg/ml, about 5 μg/ml to about 10 μg/ml, about 10 μg/ml to about 100 μg/ml, about 10 μg/ml to about 50 μg/ml, about 10 μg/ml to about 25 μg/ml, about 10 μg/ml to about 20 μg/ml, about 10 μg/ml to about 15 μg/ml, about 15 μg/ml to about 100 μg/ml, about 15 μg/ml to about 50 μg/ml, about 15 μg/ml to about 25 μg/ml, about 15 to about 20 μg/ml, about 20 μg/ml to about 100 μg/ml, about 20 μg/ml to about 50 μg/ml, about 20 μg/ml to about 25 μg/ml, about 25 μg/ml to about 100 m/ml, about 25 μg/ml to about 50 μg/ml, or about 50 μg/ml to about 100 μg/ml of secreted fusion protein. Detection and quantification of the fusion protein can be performed using an antibody which specifically recognizes and binds to the fusion protein, see the examples. It can also be detected via measuring a function of PTEN and/or the fusion protein in an in vitro assay such as the Malachite Green phosphatase assay, or an in vivo assay such as an assay measuring cell penetration in a mammalian cell or another cell-based assay measuring tumor suppressor function, including the activation of cell death, as is known in the art or described herein. Also, various technologies may be used in this purification/isolation step, for example, albumin affinity chromatography and/or a heparin affinity chromatography.

[0327] The fusion protein as disclosed herein comprises a naturally long half-life protein or protein domain (such as serum albumin). Such fusion protein may be further modified to have a high stability and/or a low aggregation compared wild type protein, for example, via polysialylation to a negatively charged amino acid. Additionally, polynucleotide(s) and vector(s) encoding a fusion protein were optimized for better expression in the host cells. Without wishing to be bound by the theory, those properties allow a productive and efficient method of producing the fusion protein with a high yield.

[0328] Also provided is a host cell comprising one or more of the polynucleotides and/or one or more of the vectors as disclosed. In one embodiment, the host cell is a prokaryotic cell or a eukaryotic cell. In a further embodiment, the host cell is a mammalian cell. Additionally or alternatively, the host cell is a cell line. In yet a further embodiment, the host cell is selected from the group of a Chinese hamster ovary (CHO) cell, or a HEK293 cell. In one embodiment, the CHO cell is a CHO-3E7 cell having an ExPASy accession number of CVCL_JY74. In another embodiment, the HEK293 cell is a HEK293-EBNA1-6E having an ExPASy accession number of CVCL_HF20. In certain embodiment, the host cell lacks expression of a protease which is able to cleave the fusion protein. In one embodiment, the protease is an intracellular protease or a protease present in a peri-cancerous cell or tissue. In a further embodiment, the protease is selected from the group of furin, MMP2/9 or Cathepsin B. In one embodiment, the host cell is a natural furin knock-out (KO) cell or cell line. In a further embodiment, the host cell is a colorectal cancer cell. In yet a further embodiment, the host cell is a LoVo cell. See, for example, Susan-Resiga et al. 2011, PMID: 21550985.

[0329] In one embodiment, a furin protein (for example, PR33 and PR34) is produced/manufactured using wild-type CHO cells. In another embodiment, a furin protein (for example, PR402, PR61, PR6, PR405, PR407 PR33, and/or PR34) is produced/manufactured using furin KO host cells, such as LoVo.

### Methods of Manufacture

[0330] Also provided is a method of manufacture of a fusion protein with a high yield, a low aggregation and/or a high stability. In one embodiment, such method allows for one or more of the following: a large-scale protein production (for example, medium used in culturing host cells secreting the fusion protein containing at least about 5 μg/ml of the fusion protein), a high yield (for example, compared to the currently available production method for a wild type PTEN), a continuous processing (for example, collecting culture medium of the host cells containing secreted fusion protein, optionally via a filter, without interrupting the growth of the host cells and/or without collecting and lysing the host cells to release the expressed fusion protein), or a produced fusion protein with low aggregation and/or high stability (for example, compared to a wild type PTEN).

[0331] Multiple methods or kits may be used to evaluate the yield, aggregating property or stability of the produced protein, such as those revealed in the examples as well as BCA Protein Assay Kit for quantifying the yield; ultracentrifugation, size-exclusion chromatography, gel electrophoresis, dynamic light scattering, or turbidity measurements for evaluating the protein aggregates; and Differential Scanning calorimetry (DSC), Pulse-Chase Method, Bleach-chase method, Cycloheximide-chase method, Circular Dichroism (CD) Spectroscopy, or Fluorescence-based Activity Assays for accessing the stability. See, e.g., www.abcam.com/bca-protein-assay-kit-ab102536.html, www.enzolifesciences.com/science-center/technotes/2017/september/what-are-the-different-methods-of-determining-protein-aggregation?/, den Engelsman J et al (2010), PMID: 20972611, info.gbiosciences.com/blog/methods-of-determining-protein-stability, and www.news-medical.net/whitepaper/20161027/A-Comprehensive-Guide-to-Protein-Stability-Assay-Platforms.aspx.

[0332] The method comprises culturing a host cell capable of expressing the fusion protein under conditions suitable for expression of the fusion protein. The host cell may be any host cell as described herein.

[0333] Additionally, the method further comprises purifying or isolating the fusion protein optionally from the cell or cell culture medium. In one embodiment, the purification and/or isolation step comprises lysing host cells to release the fusion protein expressed. In another embodiment, the purification and/or isolation step does not involve lysing host cells, instead, the fusion protein is secreted outside of the host cells. In one embodiment, after or during the culture, supernatant of host cells and/or the cell culture medium comprises about 1 μg/ml, about 2 μg/ml, about 3 μg/ml, about 4 μg/ml, about 5 μg/ml, about 10 μg/ml, about 15 μg/ml, about 20 μg/ml, about 25 μg/ml, about 30 μg/ml, about 40 μg/ml, about 50 μg/ml, about 100 μg/m, more than about 1 μg/ml, more than about 2 μg/ml, more than about 3 μg/ml, more than about 4 μg/ml, more than about 5 μg/ml, more than about 10 μg/ml, more than about 15 μg/ml, more than about 20 μg/ml, more than about 25 μg/ml, more than about 30 μg/ml, more than about 40 μg/ml, more than about 50 μg/ml, more than about 100 μg/ml, about 1 μg/ml to about 100 μg/ml, about 1 μg/ml to about 50 μg/ml, about 1 μg/ml to about 25 μg/ml, about 1 μg/ml to about 20 μg/ml, about 1 μg/ml to about 15 μg/ml, about 1 to about 10 μg/ml, about 1 to about 5 μg/ml, about 5 μg/ml to about 100 μg/ml, about 5 μg/ml to about 50 μg/ml, about 5 μg/ml to about 25 μg/ml, about 5 μg/ml to about 20 μg/ml, about 5 μg/ml to about 15 μg/ml, about 5 μg/ml to about 10 μg/ml, about 10 μg/ml to about 100 μg/ml, about 10 μg/ml to about 50 μg/ml, about 10 μg/ml to about 25 μg/ml, about 10 μg/ml to about 20 μg/ml, about 10 μg/ml to about 15 μg/ml, about 15 μg/ml to about 100 μg/ml, about 15 μg/ml to about 50 μg/ml, about 15 μg/ml to about 25 μg/ml, about 15 to about 20 μg/ml, about 20 μg/ml to about 100 μg/ml, about 20 μg/ml to about 50 μg/ml, about 20 μg/ml to about 25 μg/ml, about 25 μg/ml to about 100 μg/ml, about 25 μg/ml to about 50 μg/ml, or about 50 μg/ml to about 100 μg/ml of secreted fusion protein.

[0334] Therapeutic Methods

[0335] Further provided is a method for inhibiting the growth of a cancer cell comprising, or alternatively consisting essential of, or yet further consisting, contacting the cell or tissue comprising the cell with a system comprising, or alternatively consisting essentially of, or yet further consisting of an oncolytic Herpes Simplex Virus (oHSV) expressing an albumin-PTEN fusion polynucleotide and an anti-PD1 antibody, analog, derivative or PD1 binding fragment thereof. Non-limiting examples of oHSV include for example, oHSV1, oHSV2, or varicella zoster virus, or Epstein-Barr virus, or human cytomegalovirus, or human herpesvirus 6A and 6B, Kaposi's sarcoma-associated herpesvirus or any appropriately modified of the 115 currently recognized herpesviridae species [International Committee on the Taxonomy of Viruses (ICTV; talk.ictvonline.org/taxonomy) and en.wikipedia.org/wiki/Herpesviridae; accessed both on Aug. 21, 2021. A non-limiting example of the albumin-PTEN fusion polynucleotide comprises, or consists essentially of, or yet further consists of SEQ ID NO:226 and equivalents thereof. A non-limiting example of an oHSV1 comprises, consists essentially thereof, or consists of, SEQ ID NO:242, or an equivalent thereof. An example of an oHSV2 is provided in SEQ ID NO:241 (see also FIG. 23D) and equivalents thereof.

[0336] Non-limiting examples of the anti-PD1 antibody include, without limitation, pembrolizumab, nivolumab, sintilimab, tislelizumab, toripalimab, camrelizumab geptanolimab serplulimab zimberelimab cemiplimab, dostarlimab, prolgolimab, balstilimab, penpulimab, retifanlimab, cadonilimab, pucotenlimab, sasanlimab, or cetrelimab, derivatives and analogs thereof. The amino acid sequences these are known in the art and provided herein. A non-limiting example of the PTEN-albumin fusion polynucleotide comprises, or consists essentially of, or yet further consists of, SEQ ID NO:226, or equivalent thereof, and the anti-PD1 binding fragment comprises SEQ ID NO:222, or equivalent thereof.

[0337] The polynucleotide encoding the albumin-PTEN fusion comprises SEQ ID NO:226, or an equivalent thereof, and the antigen binding fragment of the anti-PD1 antibody comprises an scFv fragment of an anti-PD1 antibody selected from pembrolizumab, nivolumab, sintilimab, tislelizumab, toripalimab, camrelizumab geptanolimab serplulimab zimberelimab cemiplimab, dostarlimab, prolgolimab, balstilimab, penpulimab, retifanlimab, cadonilimab, pucotenlimab, sasanlimab, or cetrelimab, derivatives and analogs thereof.

[0338] In one aspect, the system is conjugated to a carrier, optionally a polymer, a dendrimer, an aptamer, a polymeric coating, a hydrogel, or a mesenchymal stem cell (MSC). Examples of such are provided herein.

[0339] The contacting is in vitro or in vivo.

[0340] In one aspect, the cell expresses PD1 and/or expresses minimal or no PTEN. In one aspect, the cancer cell is a colorectal cancer cell. In one aspect, the when the system is contacted with the cell or tissue, and wherein the oHSV and the anti-PD1 antibody, analog, derivative or PD1 binding fragment thereof is contacted sequentially, separately or concurrently with the cell or tissue.

[0341] Further provided is a method for inhibiting the growth of a cancer cell comprising, or consisting essentially of, or yet further consisting of contacting the cell or tissue comprising the cell with the system as described herein. In one aspect the cancer cell expresses PD1 and/or minimal or no PTEN. Non-limiting examples include a blood cancer, a carcinoma or a sarcoma. In another aspect, the cancer cell is a colorectal cancer cell, a breast cancer cell or a brain cancer cell. In a further aspect, the cell is a mammalian or a human cancer cell.

[0342] In another aspect, provided herein is a method treating a cancer in a subject in need thereof, comprising, or alternatively consisting essentially of, or yet further consisting of, administering to the subject an effective amount of the system as described herein, thereby treating the cancer. In one aspect, the cancer expresses PD and/or minimal or no PTEN. In one aspect, the cancer is a blood cancer, a carcinoma or a sarcoma. In another aspect, the cancer is colorectal cancer, a breast cancer or a brain cancer. In one aspect the subj et is a mammal, such as a human patient. Modes for administration and formulation of the system are described herein. The method can be administered as a first line, second line, third line, fourth line or fifth line therapy.

[0343] The methods as described herein can be combined with additional therapies, also as described herein.

[0344] The ability of the present combinations of oncolytic viral vectors expressing albumin-PTEN fusions and immune checkpoint inhibitors to restore PTEN function, including inhibition of cancer cell proliferation, and to improve the response to immunotherapy, makes them useful for treating cancer. Accordingly, an aspect of the present invention thus relates to the present combination of oncolytic viral vectors expressing albumin-PTEN fusions and immune checkpoint inhibitor as a medicament.

[0345] In another aspect, the present disclosure provides methods of treating cancer in a patient in need thereof. Cancers which can be treated with the combination of the invention are notably the cancers which have little or no PTEN tumor suppressor or contain a mutant PTEN that promotes cancer growth and/or cell proliferation.

[0346] Patients suitable for oncolytic viral vectors expressing albumin-PTEN fusions and immune checkpoint inhibitor combination therapy are patients diagnosed with cancer. The cancer can be of any type and at any clinical stage or manifestation. For example, patients with bladder, brain, breast, colorectal, gastrointestinal, head & neck, liver, lung, kidney, melanoma, ovarian, pancreatic, prostate, sarcoma, skin carcinoma, hematologic tumors etc. are amenable to oncolytic virotherapy in clinical trials (detailed in Macedo et al, 2020: PMID: 33046622). Suitable subjects include patients with operable or inoperable tumors, patients whose tumors have been surgically removed or resected, patients with a tumor comprising cells carrying a oncogene (e.g. vRAS), or an oncogenic mutation of a tumor suppressor gene such as, p53, PTEN etc.; patients who have received or receive other therapy for cancer. Other therapy for cancer includes, but is not limited to, chemotherapeutic treatment, radiation therapy, surgical resection, and treatment with one or more other modalities, as detailed below.

[0347] According to some embodiments, combinations of oncolytic viral vectors expressing albumin-PTEN fusions and immune checkpoint inhibitors as disclosed herein are administered in a composition to a subject in need of prevention of metastatic cancer in a therapeutically effective amount. Such subjects include but are not limited to those determined to have primary cancer but in whom the cancer is not known to have spread to distant tissues or organs.

[0348] Oncolytic virotherapy with albumin-PTEN fusions and immune checkpoint inhibitor combination therapy can be combined with, or adjunctive to, one or more other treatments. Other treatments include, without limitation, chemotherapeutic treatment, antibody therapy, viral delivery potentiators, radiation therapy, surgical resection, imaging or ultrasound-guided delivery, etc.

[0349] Combination therapy as provided herein involves the administration of at least two agents to a patient, the first of which is an oncolytic viral vector expressing albumin-PTEN fusion and an immune checkpoint inhibitor as combined in this disclosure, and the second is another therapeutic agent, wherein the first and the second therapeutic agents can be administered simultaneously, successively, or separately.

[0350] As used herein, the oncolytic viral vector expressing albumin-PTEN fusion and the immune checkpoint inhibitor and the other therapeutic agent are said to be administered successively if they are administered to the patient on the same day, for example during the same patient visit. Successive administration can occur 1, 2, 3, 4, 5, 6, 7 or 8 hours apart. In contrast, the combination of the disclosure and the other therapeutic agent are said to be administered separately if they are administered to the patient on the different days, for example, the combination of the disclosure and the other therapeutic agent can be administered at a 1-day, 2-day or 3-day, one-week, 2-week or monthly intervals. In the methods of the present disclosure, administration of the combination of the disclosure can precede or follow administration of the other therapeutic agent.

[0351] As a non-limiting example, the instant combination and other therapeutic agent can be administered concurrently for a period of time, followed by a second period of time in which the administration of the oncolytic viral vector expressing albumin-PTEN fusion and an immune checkpoint inhibitor of the disclosure and the other therapeutic agent is alternated.

[0352] Combination therapies of the present disclosure can result in a greater than additive, or a synergistic, effect, providing therapeutic benefits where neither the oncolytic viral vector expressing albumin-PTEN fusion/immune checkpoint inhibitor combination nor other therapeutic agent is administered in an amount that is, alone, therapeutically effective. Thus, such agents can be administered in lower amounts, reducing the possibility and/or severity of adverse effects.

[0353] In a preferred embodiment, the other therapeutic agent is a chemotherapeutic agent. A “chemotherapeutic agent,” as used herein, refers to a substance which, when administered to a subject, treats or prevents the development of cancer in the subject's body.

[0354] Kits. Further provided are kits is one or more of the fusion polypeptides/proteins, polynucleotides, vectors, or host cells, and optionally instructions for manufacture and/or use.

### Experimental

[0355] Using standard procedures in the art, Applicant initially expressed PTEN-L (SEQ ID NO:3) in bacteria by generating periplasmic and cytoplasmic expression vectors containing the human PTEN-L cDNA tagged in frame with the hexahistidine (6xHis) tag (SEQ ID NO: 243) at the N′ or C-terminus. The best orientation was the cytoplasmically targeted N′-term His mutant (FIG. 1). Optimization of the induction conditions failed to materially increase the absolute yield of soluble protein, which remained very low at all times; in addition, the specific activity of the protein in the Malachite Green in vitro phosphatase assay (Spinelli & Leslie, 2015: PMID: 25461809) was low and hardly reproducible (data not shown). Thus, E. coli is not a suitable system to express the PTEN-L tumor suppressor.

[0356] The human PTEN-L cDNA was sequence-optimized for C. glutamicum expression and cloned in pPK4 and pK10 expression vectors downstream of 3 specific C. glutamicum secretion leader signals (CspA, CspB, TorA), wherein the resulting cDNAs and proteins are listed as SEQ ID NO:41 (CspA-PTEN-L cDNA), SEQ ID NO:42 (CspB-TEV-PTEN-L cDNA), SEQ ID NO:43 (TorA-PTEN-L cDNA), SEQ ID NO:79 (CspA-PTEN-L), SEQ ID NO:80 (CspB-TEV-PTEN-L) and SEQ ID NO:81 (TorA-PTEN-L), respectively. Like in other secretory systems, upon secretion the leader is cleaved and the target protein is released in the C. glutamicum supernatant. (Inclusion of the TEV protease cleavage site can serve to release the wild-type protein if needed, as is known in the art). However, although PTEN-L is expressed in this host, it remains trapped in the intracellular insoluble fraction of these bacteria (FIG. 2, dots) after 72 h in culture and no secretion can be achieved. Hence, C. glutamicum is no better than E. coli, both being unsuitable for industrial manufacturing of the protein.

[0357] The Lactobacillus genus of probiotic bacteria is known to be able to secrete heterologous exogenous proteins in the bacterial supernatant. The human PTEN-L cDNA was sequence-optimized for expression in Lactobacillus plantarum and cloned in the pSIP609 L. plantarum expression vector (Sak-Ubol et al, 2016; PMID: 27176608), downstream of 6 specific L. plantarum leader secretion signals; shown here are the expression results only for two of the six signals tested, namely the 2958 and 0297 leaders; wherein the corresponding cDNAs and proteins are listed as SEQ ID NO:44 (Lp2958-PTEN-L cDNA), SEQ ID NO:45 (Lp0297-PTEN-L cDNA), SEQ ID NO:82 (Lp2958-PTEN-L) and SEQ ID NO:83 (Lp0297-PTEN-L), respectively (FIG. 3). While exogenous manB protein could be indeed secreted in the L. plantarum supernatant (left), PTEN-L is not at all expressed in this host—not even in the cell lysate (lanes 3-6). As a positive control, mammalian glioma SHSYSY extracts were blotted with a pan-PTEN mAb (F-1) revealing the presence of both PTEN-S (55 KDa) and PTEN-L (70 KDa) in the extracts (lane 2). The various high MW bands seen in the odd lanes are non-specific mAb-reacting L. plantarum proteins that can be observed in both untransformed (lane 1) and pSIP609-transformed cells (lanes 3 and 5). Hence, Lactobacillus plantarum is unsuitable for industrial manufacturing of PTEN-L.

[0358] A yeast sequence-optimized cDNA comprising a Pichia pastoris-specific signal peptide driving secretion of human albumin-PTEN-M fusion (SEQ ID NO:46) or just the human PTEN-L cDNA (SEQ ID NO:47) were cloned in a P. pastoris expression vector (ATUM Biosciences, San Francisco) and expressed in yeast [the corresponding protein sequences are listed as SEQ ID NO:84 (HSA-PTEN-M) and SEQ ID NO:85 (PTEN-L), respectively]. Gist mutS Pichia pastoris cells were transformed with the vector and the promoter was then induced with 0.5% methanol for 24 h or 48 h. Culture supernatants and cell lysates were loaded on SDS-PAGE (FIG. 4, top) and subsequently western blotted with a LUD-specific PTEN-L mAb (clone 3A4.1, Millipore). However, PTEN-L is neither secreted (“extracellular”) nor made in absolute terms (“intracellular” fraction of the cell lysate), whereas the antibody readily detects bacterially expressed PTEN-L (isolated from E. coli inclusion bodies and solubilized in Laemmli buffer; FIG. 4, bottom). Hence, Pichia pastoris is unsuitable for industrial manufacturing of PTEN-L.

[0359] Applicant then assessed whether insect Sf9 cells might be able to express a PTEN-M fusion protein mediated by infection with baculovirus carrying the cDNA for the fusion. Accordingly, optimized cDNA sequences encoding for an insect Sf9 cell gp64 secretory signal peptide, human thioredoxin (Trx), which is known in the art to solubilize difficult-to-express proteins, the TEV protease, the cDNA of the human PTEN-M tumor suppressor and a C-terminal 6xHis tag (SEQ ID NO: 243) were synthesized and inserted in frame from 5′ to 3 in the pFastBac1 baculovirus expression vector (the optimized cDNA of the fusion is disclosed as SEQ ID NO:86 while the resulting protein sequence as SEQ ID NO:87). Following infection of the Sf9 cells with the virus, performed by standard procedures known in the art, the cDNA is initially expressed into a pre-protein (gp64-Trx-TEV-PTEN-M) fusion, the leader peptide is cleaved and ultimately the Trx-PTEN-M fusion protein is secreted in the culture supernatant. However, no appreciable enrichment was evident in the supernatant of the cells infected with the fusion-encoding virus vs. the negative-control (empty) virus supernatant, as determined by SDS-PAGE (FIG. 5, top panel, lane 1 vs. 5). However, upon western-blotting of these extracts using an anti-6xHis antibody (SEQ ID NO: 243) (FIG. 5, middle panel), a protein migrating at the expected MW of the secreted fusion (around 80 KDa; green band) could be detected in the cell supernatant but also in both the total and the soluble fraction of the virus-infected cells (green band; FIG. 5, middle panel, lanes 1-3), but not in the corresponding fractions of the empty virus-infected cells (FIG. 5, middle panel lanes 4-6). In addition, the anti-His antibody specifically detects a 65-70 KDa protein band migrating around the expected level of PTEN-L (FIG. 5, middle panel, lanes 1-3 but not 4-8). Infection was subsequently repeated in high volumes, proteins from lane 1 were separated by SDS-PAGE, the 65 KDa band was excised from the gel and sequenced by LC/MS. It was found that the 65 KDa band corresponded to a PTEN-L variant, having the exact sequence of aa(52-576 of SEQ ID NO:1) or human PTEN-L (FIG. 5, lower panel, underlined residues). However, this variant lacksall N′ sequences upstream of His52, including the Trx sequences and, more annoyingly, the Minimal Cell Penetration Domain stretch of 6 Arginines (MCPD; SEQ ID NO:39), which is known to mediate 60-80% of cell entry of PTEN-L and PTEN-M (Hopkins et al, 2013: PMID: 23744781; Tzani et al, 2016: PMID: 27249819; Liang et al, 2017: PMID: 28332494). Because there is little specific enrichment of the degradant (SDS-PAGE; lane 1 vs. 4) and the major PTEN-L (65-70 KDa) band has no cell penetration domain, this system is altogether deemed unacceptable for industrial manufacturing of the wild-type cell-penetrating PTEN-L tumor suppressor.

[0360] Applicant constructed a battery of mammalian albumin-PTEN fusions in both orientations, as follows (see Table 1 for details):

[0361] N′-(SP)(L1)(Albumin)(L2)(PTEN)(L3)-C′

[0362] N′-(SP)(L1)(PTEN)(L2)(Albumin)(L3)-C′

[0363] Wherein SP is a Signal Peptide selected of SEQ ID NO:4, 93-105.

[0364] L1, L2 or L3 are fusion-specific linker sequences.

TABLE 1

| | | | SEQ | |
|---|---|---|---|---|
| | | | ID | Sequence |
| Mutant | Summary Structure | Comments & Notes | NO: | Type |
| | Human PTEN-L or pre-PTEN- | | 1 | Protein |
| | L | | | |
| | Human PTEN-S | | 2 | Protein |
| | Mature human PTEN-L or | | 3 | Protein |
| | PTEN-L | | | |
| | Human PTEN-L Signal | | 4 | Protein |
| | Peptide | | | |
| | Mature human PTEN-L | | 5 | Protein |
| | Unique Domain (LUD) | | | |
| | Human PTEN-M | | 6 | protein |
| | Human PTEN-N | | 7 | protein |
| | Human PTEN-O | | 8 | protein |
| | Human PTEN-M Unique | | 9 | protein |
| | Domain (MUD) | | | |
| | Human PTEN-N Unique | | 10 | protein |
| | Domain (NUD) | | | |
| | Human PTEN-O Unique | | 11 | protein |
| | Domain (OUD) | | | |
| | Human Serum Albumin | | 12 | protein |
| | (HSA) (full length pre-protein) | | | |
| | Mature Human Serum | | 13 | protein |
| | Albumin (HSA) (secreted | | | |
| | form) | | | |
| PR1 | SP(HSA)-HSA-Fu-PTEN-M- | Furin sensitive linker: SEQ ID | 14 | protein |
| | 6xHis | NO: 164 | | |
| PR2 | SP(HSA)-HSA-MMP2/9- | MMP2/9 sensitive linker: SEQ ID | 15 | protein |
| | PTEN-M-6xHis | NO: 165 | | |
| PR3 | SP(HSA)-HSA-PTEN-M- | | 16 | protein |
| | 6xHis | | | |
| PR5 | SP(HSA)-HSA-MMP2/9-Fu- | MMP2/9 & Furin-sensitive linker | 17 | protein |
| | PTEN-M-6xHis | (SEQ ID NO: 48) | | |
| PR6 | SP(HSA)-HSA-PTEN-S-HA | HA epitope tag: YPYDVPDYAC | 18 | protein |
| | tag | (SEQ ID NO: 244) | | |
| PR61 | SP(HSA)-HSA-PTEN-S- | product of SEQ ID | 19 | protein |
| | 6xHis | 93 + 13 + 2 + 6xHis (SEQ ID NO: | | |
| | | 243) | | |
| PR62 | SP(HSA)-HSA-Fu-PTEN-S- | Furin sensitive linker: SEQ ID | 20 | protein |
| | 6xHis | NO: 164 | | |
| PR63 | SP(HSA)-HSA-[L(44-59)- | PTEN-L portions numbered after | 21 | protein |
| | L(151-173)]-PTEN-S-6xHis | SEQ ID NO: 1 | | |
| PR64 | SP(HSA)-HSA-Fu-[L(44-59)- | PTEN-L portions numbered after | 22 | protein |
| | L(151-173)]-PTEN-S-6xHis | SEQ ID NO: 1 | | |
| PR31 | SP(HSA)-HSA-L(43-79)- | PTEN-L portions numbered after | 23 | protein |
| | PTEN-S-6xHis | SEQ ID NO: 1 | | |
| PR32 | SP(HSA)-HSA-L(80-120)- | PTEN-L portions numbered after | 24 | protein |
| | PTEN-S-6xHis | SEQ ID NO: 1 | | |
| PR33 | SP(HSA)-HSA-L(121-173)- | PTEN-L portions numbered after | 25 | protein |
| | PTEN-S-6xHis | SEQ ID NO: 1 | | |
| PR4 | SP(HSA)-PTEN-L-6xHis- | MMP2/9 & Furin-sensitive linker | 26 | protein |
| | MMP2/9-Fu-HSA-Flag | (SEQ ID NO: 48) | | |
| PR401 | SP(HSA)-PTEN-L-Fu-HSA- | Furin sensitive linker: SEQ ID | 27 | protein |
| | 6xHis | NO: 164 | | |
| PR402 | SP(HSA)-PTEN-L-HSA- | product of SEQ ID | 28 | protein |
| | 6xHis | 93 + 3 + 13 + 6xHis (SEQ ID NO: | | |
| | | 243) | | |
| PR403 | SP(HSA)-[L(22-27)-L(44-59)- | PTEN-L portions numbered after | 29 | protein |
| | L(151-173)]-PTEN-S-HSA- | SEQ ID NO: 1 | | |
| | 6xHis | | | |
| PR404 | SP(HSA)-[L(22-27)-L(44-59)- | PTEN-L portions numbered after | 30 | protein |
| | L(151-173)]-PTEN-S-Fu- | SEQ ID NO: 1; Furin after SEQ | | |
| | HSA-6xHis | ID NO: 164 | | |
| PR410 | SP(HSA)-PTEN-L-6xHis | Wild-type human PTEN-L (SEQ | 31 | protein |
| | | NO: 3) tagged with 6xHis (SEQ | | |
| | | ID NO: 243) | | |
| PR411 | SP(IgGκ)-PTEN-L-6xHis | SP(IgGk) from SEQ ID NO: 101 | 32 | protein |
| PR412 | SP(HSA)-PTEN-L(3xPro)- | PTEN-M, N, O initiator aa all | 33 | protein |
| | 6xHis | mutated to Pro | | |
| PR7 | SP(IgGκ)-PTEN-L-6xHis-Fc | SP(IgGκ) = SEQ ID NO: 101; | 34 | protein |
| | | PTEN-L from SEQ ID NO: 3; | | |
| | | plus wild-type Fc | | |
| PR700 | SP(IgGκ)-PTEN-L-6xHis- | Fc(N297Q) is the ADCC- | 35 | protein |
| | Fc(N297Q) | deficient Fc variant | | |
| PR8 | SP(IgGκ)-Fc-(GGGGS)- | SP(IgGκ) = SEQ ID NO: 101 with | 36 | protein |
| | PTEN-M-6xHis | Glycine linker fused to SEQ ID | | |
| | | NO: 6 | | |
| PR911 | SP(HSA)-HA tag-PTEN-S- | MUD sandwiched between 2 | 37 | protein |
| | (GGGG)-PTEN-L(8-173)- | PTEN-S domains | | |
| | PTEN-S-6xHis | | | |
| F131 | SP(HSA)-HSA-MUD- | domain structure like in PR3 | 38 | protein |
| | (GGGGS)-p53-6xHis | | | |
| | Minimal Cell Penetration | RRRRRR (6Arg stretch) | 39 | protein |
| | Domain (MCPD) | | | |
| | Membrane Binding Domain | corresponds to aa(151-173) of | 40 | protein |
| | (MBD) | SEQ ID NO: 1 | | |
| | CspA-PTEN-L cDNA | optimized cDNA sequence | 41 | polynucleotide |
| | | encoding for protein with SEQ ID | | |
| | | NO: 79 | | |
| | CspB-TEV-PTEN-L cDNA | optimized cDNA sequence | 42 | polynucleotide |
| | | encoding for protein with SEQ ID | | |
| | | NO: 80 | | |
| | TorA-PTEN-L cDNA | optimized cDNA sequence | 43 | polynucleotide |
| | | encoding for protein with SEQ ID | | |
| | | NO: 81 | | |
| | Lp2958-PTEN-L cDNA | optimized cDNA sequence | 44 | polynucleotide |
| | | encoding for protein with SEQ ID | | |
| | | NO: 82 | | |
| | Lp0297-PTEN-L cDNA | optimized cDNA sequence | 45 | polynucleotide |
| | | encoding for protein with SEQ ID | | |
| | | NO: 83 | | |
| | SP(αMF)-HSA-PTEN-M | optimized cDNA sequence | 46 | polynucleotide |
| | cDNA | encoding for protein with SEQ ID | | |
| | | NO: 84 | | |
| | SP(αMF)-PTEN-L cDNA | optimized cDNA sequence | 47 | polynucleotide |
| | | encoding for protein with SEQ ID | | |
| | | NO: 85 | | |
| | MMP2/9 & Furin-sensitive | GPAALKAATNRRKKRALDA | 81 | protein |
| | linker sequence | AY | | |
| PR430 | Trx-6xHis-UBI-TEV-PTEN-L | TRX = thioredoxin; UBI = ubiquitin | 49 | protein |
| | | (non-cleavable) | | |
| PR34 | SP(HSA)-HSA-PTEN- | like PR3 but without the 6Arg | 50 | protein |
| | M(AR6)-6xHis | CPD (“6Arg” disclosed as SEQ | | |
| | | ID NO: 39) | | |
| | Wider Cell Penetration | corresponds to aa(43-79) of SEQ | 51 | protein |
| | Domain (WCPD) | ID NO: 1 | | |
| | | corresponds to aa(80-173) of | 52 | protein |
| | | SEQ ID NO: 1 | | |
| | Cell Penetration Domain* | corresponds to aa(44-59) of SEQ | 53 | protein |
| | (CPD*) | ID NO: 1 | | |
| | PR1 cDNA | optimized cDNA sequence | 54 | polynucleotide |
| | | encoding for protein with SEQ ID | | |
| | | NO: 14 | | |
| | PR2 cDNA | optimized cDNA sequence | 55 | polynucleotide |
| | | encoding for protein with SEQ ID | | |
| | | NO: 15 | | |
| | PR3 cDNA | optimized cDNA sequence | 56 | polynucleotide |
| | | encoding for protein with SEQ ID | | |
| | | NO: 16 | | |
| | PR5 cDNA | optimized cDNA sequence | 57 | polynucleotide |
| | | encoding for protein with SEQ ID | | |
| | | NO: 17 | | |
| | PR6 cDNA | optimized cDNA sequence | 58 | polynucleotide |
| | | encoding for protein with SEQ ID | | |
| | | NO: 18 | | |
| | PR61 cDNA | optimized cDNA sequence | 59 | polynucleotide |
| | | encoding for protein with SEQ ID | | |
| | | NO: 19 | | |
| | PR62 cDNA | optimized cDNA sequence | 60 | polynucleotide |
| | | encoding for protein with SEQ ID | | |
| | | NO: 20 | | |
| | PR63 cDNA | optimized cDNA sequence | 61 | polynucleotide |
| | | encoding for protein with SEQ ID | | |
| | | NO: 21 | | |
| | PR64 cDNA | optimized cDNA sequence | 62 | polynucleotide |
| | | encoding for protein with SEQ ID | | |
| | | NO: 22 | | |
| | PR31 cDNA | optimized cDNA sequence | 63 | polynucleotide |
| | | encoding for protein with SEQ ID | | |
| | | NO: 23 | | |
| | PR32 cDNA | optimized cDNA sequence | 64 | polynucleotide |
| | | encoding for protein with SEQ ID | | |
| | | NO: 24 | | |
| | PR33 cDNA | optimized cDNA sequence | 65 | polynucleotide |
| | | encoding for protein with SEQ ID | | |
| | | NO: 25 | | |
| | PR4 cDNA | optimized cDNA sequence | 66 | polynucleotide |
| | | encoding for protein with SEQ ID | | |
| | | NO: 26 | | |
| | PR401 cDNA | optimized cDNA sequence | 67 | polynucleotide |
| | | encoding for protein with SEQ ID | | |
| | | NO: 27 | | |
| | PR402 cDNA | optimized cDNA sequence | 68 | polynucleotide |
| | | encoding for protein with SEQ ID | | |
| | | NO: 28 | | |
| | PR403 cDNA | optimized cDNA sequence | 69 | polynucleotide |
| | | encoding for protein with SEQ ID | | |
| | | NO: 29 | | |
| | PR404 cDNA | optimized cDNA sequence | 70 | polynucleotide |
| | | encoding for protein with SEQ ID | | |
| | | NO: 30 | | |
| | PR410 cDNA | optimized cDNA sequence | 71 | polynucleotide |
| | | encoding for protein with SEQ ID | | |
| | | NO: 31 | | |
| | PR411 cDNA | optimized cDNA sequence | 72 | polynucleotide |
| | | encoding for protein with SEQ ID | | |
| | | NO: 32 | | |
| | PR412 cDNA | optimized cDNA sequence | 73 | polynucleotide |
| | | encoding for protein with SEQ ID | | |
| | | NO: 33 | | |
| | PR7 cDNA | optimized cDNA sequence | 74 | polynucleotide |
| | | encoding for protein with SEQ ID | | |
| | | NO: 34 | | |
| | PR700 cDNA | optimized cDNA sequence | 75 | polynucleotide |
| | | encoding for protein with SEQ ID | | |
| | | NO: 35 | | |
| | PR8 cDNA | optimized cDNA sequence | 76 | polynucleotide |
| | | encoding for protein with SEQ ID | | |
| | | NO: 36 | | |
| | PR911 cDNA | optimized cDNA sequence | 77 | polynucleotide |
| | | encoding for protein with SEQ ID | | |
| | | NO: 37 | | |
| | F131 cDNA | optimized cDNA sequence | 78 | polynucleotide |
| | | encoding for protein with SEQ ID | | |
| | | NO: 38 | | |
| | CspA-PTEN-L | C. glutamicum CspA signal | 79 | protein |
| | | peptide driving secretion of | | |
| | | human PTEN-L | | |
| | CspB-TEV-PTEN-L | C. glutamicum CspB signal | 80 | protein |
| | | peptide driving secretion of | | |
| | | human PTEN-L w/TEV | | |
| | TorA-PTEN-L | C. glutamicum TorA signal | 1 | protein |
| | | peptide driving secretion of | | |
| | | human PTEN-L | | |
| | Lp2958-PTEN-L | Lactobacillus Lp2958 signal | 82 | protein |
| | | peptide driving human PTEN-L | | |
| | | secretion | | |
| | Lp0297-PTEN-L | Lactobacillus Lp0297 signal | 83 | protein |
| | | peptide driving human PTEN-L | | |
| | | secretion | | |
| | SP(αMF)-HSA-PTEN-M | yeast alpha mating factor signal | 84 | protein |
| | | peptide driving human HSA- | | |
| | | PTEN-M secretion | | |
| | SP(αMF)-PTEN-L | yeast alpha mating factor signal | 85 | protein |
| | | peptide driving human PTEN-L | | |
| | | secretion | | |
| | Gp64-Trx-TEV-PTEN-M- | optimized cDNA sequence | 86 | polynucleotide |
| | 6xHis cDNA | encoding for protein with SEQ ID | | |
| | | NO: 87 | | |
| | Gp64-Trx-TEV-PTEN-M- | Sf9 signal peptide driving | 87 | protein |
| | 6xHis | Thioredoxin-PTEN-M fusion; | | |
| | | cleavable by TEV protease | | |
| | Mouse PTEN-S | | 88 | protein |
| | Mature mouse PTEN-L | | 89 | protein |
| | Mature Simian Serum | | 90 | protein |
| | Albumin (SSA) | | | |
| | Mature Rat Serum Albumin | | 91 | protein |
| | (RSA) | | | |
| | Mature Mouse Serum | | 92 | protein |
| | Albumin (MSA) | | | |
| | Signal Peptide of Human | | 93 | protein |
| | Serum Albumin | | | |
| | Signal Peptide of Simian | | 94 | protein |
| | Serum Albumin | | | |
| | Signal Peptide of Rat Serum | | 95 | protein |
| | Albumin | | | |
| | Signal Peptide of Mouse | | 96 | protein |
| | Serum Albumin | | | |
| | Signal Peptide of murine α2- | | 97 | protein |
| | macroglobulin | | | |
| | Signal Peptide of murine | | 98 | protein |
| | fibrinogen | | | |
| | Signal Peptide of murine α1- | | 99 | protein |
| | antitrypsin | | | |
| | Signal Peptide of murine IgGκ | | 100 | protein |
| | chain | | | |
| | Signal Peptide of human IgGκ | | 101 | protein |
| | heavy chain | | | |
| | Signal Peptide of human IgGκ | | 102 | protein |
| | chain | | | |
| | Human Siglec 3 (CD33) | | 103 | protein |
| | Signal Peptide | | | |
| | Artificial Signal Peptide | from Guler-Gane et al, 2016 | 104 | protein |
| | (Secrecon) | | | |
| | Artificial Signal Peptide | from Guler-Gane et al, 2016 | 105 | protein |
| | (Boosted Secrecon) | | | |
| | Cathepsin B-sensitive linker | GGAGS | 106 | protein |
| | sequence | | | |
| | Cathepsin B-sensitive linker | GFVG | 107 | protein |
| | sequence | | | |
| | Cathepsin B-sensitive linker | FGFVG | 108 | protein |
| | sequence | | | |
| PR419 | SP(SEQ ID NO: 97)-PTEN-L- | PR402 secreted via the Signal | 109 | protein |
| | HSA-6xHis | Peptide of murine α2- | | |
| | | macroglobulin | | |
| PR420 | SP(SEQ ID NO: 98)-PTEN-L- | PR402 secreted via the Signal | 110 | protein |
| | HSA-6xHis | Peptide of murine fibrinogen | | |
| PR421 | SP(SEQ ID NO: 99)-PTEN-L- | PR402 secreted via the Signal | 111 | protein |
| | HSA-6xHis | Peptide of murine α1-antitrypsin | | |
| PR422 | SP(SEQ ID NO: 100)-PTEN- | PR402 secreted via the Signal | 112 | protein |
| | L-HSA-6xHis | Peptide of murine IgGκ chain | | |
| PR424 | SP(SEQ ID NO: 102)-PTEN- | PR402 secreted via the Signal | 113 | protein |
| | L-HSA-6xHis | Peptide of human IgGκ chain | | |
| PR425 | SP(SEQ ID NO: 103)-PTEN- | PR402 secreted via the Human | 114 | protein |
| | L-HSA-6xHis | Siglec 3 (CD33) Signal Peptide | | |
| PR426 | SP(SEQ ID NO: 104)-PTEN- | PR402 secreted via the Artificial | 115 | protein |
| | L-HSA-6xHis | Signal Peptide (Secrecon) | | |
| PR427 | SP(SEQ ID NO: 105)-PTEN- | PR402 secreted via the Artificial | 116 | protein |
| | L-HSA-6xHis | Signal Peptide (Boosted | | |
| | | Secrecon) | | |
| PR428 | SP(MSA)-muPTEN-L-MSA- | mouse PR402; product of SEQ | 117 | protein |
| | 6xHis | ID NOS: 96 + 89 + 92 + 6xHis (SEQ | | |
| | | ID NO: 243) | | |
| PR409 | SP(HSA)-HAtag-PTEN-L- | N-term HA tagged PR402 | 118 | protein |
| | HSA-6xHis | | | |
| PR415 | SP(HSA)-PTEN-L- | identical to PR402 but for | 119 | protein |
| | HSA(C34S) | scavenger HSA Cys34 and lack | | |
| | | of 6xHis (SEQ ID NO: 243) | | |
| PR416 | SP(HSA)-PTEN-M- | scavenger HSA Cys34 mutated | 120 | protein |
| | HSA(C34S) | | | |
| PR413 | SP(HSA)-PTEN-L-HSA(1- | PR402 bearing a HSA(1-385) or | 121 | protein |
| | 385)-6xHis | ΔdIII albumin deletion mutant | | |
| PR414 | SP(HSA)-PTEN-L-HSA(1- | PR402 bearing a HSA(1-197) or | 122 | protein |
| | 197)-6xHis | ΔdII & ΔdIII albumin deletion | | |
| | | mutant | | |
| PR417 | SP(HSA)-PTEN-L-HSA(35- | PR402 bearing an N-terminal | 123 | protein |
| | 585)-6xHis | HSA deletion mutant | | |
| PR418 | SP(HSA)-PTEN-L-HSA(63- | PR402 bearing an N-terminal | 124 | protein |
| | 585)-6xHis | HSA deletion mutant | | |
| PR65 | SP(HSA)-PTEN-S(2-403)- | inverse orientation of PR6 and | 125 | protein |
| | HSA-6xHis | PR61 | | |
| PR66 | SP(MSA)-RSA-mouse PTEN- | rat PR61 equivalent | 126 | protein |
| | S(2-403)-6xHis | | | |
| PR67 | SP(MSA)-RSA(1-381)-mouse | PR68 ΔdIII HSA | 127 | protein |
| | PTEN-S(2-403)-6xHis | | | |
| PR68 | SP(MSA)-MSA-mouse | mouse PR61 equivalent | 128 | protein |
| | PTEN-S(2-403)-6xHis | | | |
| PR405 | SP(HSA)-PTEN-L-MMP2/9- | PR402 with SEQ ID NO: 49 | 129 | protein |
| | HSA-6xHis | inserted in frame between the two | | |
| | | domains | | |
| PR406 | SP(HSA)-PTEN-L-cathepsin | PR402 with SEQ ID NO: 106 | 130 | protein |
| | B-HSA-6xHis | inserted in frame between the two | | |
| | | domains | | |
| PR407 | SP(HSA)-PTEN-L-cathepsin | PR402 with SEQ ID NO: 107 | 131 | protein |
| | B*-HSA-6xHis | inserted in frame between the two | | |
| | | domains | | |
| PR408 | SP(HSA)-PTEN-L- | PR402 with SEQ ID NO: 108 | 132 | protein |
| | cathepsinB**-HSA-6xHis | inserted in frame between the two | | |
| | | domains | | |
| F137 | SP(HSA)-LUD-p53-HSA- | domain structure like in PR402 | 133 | protein |
| | 6xHis | | | |
| | Mutated Human LUD with | see FIG. 19 | 134 | protein |
| | sialy1-like charges | | | |
| | PR430 cDNA | optimized cDNA sequence | 135 | polynucleotide |
| | | encoding for protein with SEQ ID | | |
| | | NO: 49 | | |
| | PR34 cDNA | optimized cDNA sequence | 136 | polynucleotide |
| | | encoding for protein with SEQ ID | | |
| | | NO: 50 | | |
| | PR419 cDNA | optimized cDNA sequence | 137 | polynucleotide |
| | | encoding for protein with SEQ ID | | |
| | | NO: 109 | | |
| | PR420 cDNA | optimized cDNA sequence | 138 | polynucleotide |
| | | encoding for protein with SEQ ID | | |
| | | NO: 110 | | |
| | PR421 cDNA | optimized cDNA sequence | 139 | polynucleotide |
| | | encoding for protein with SEQ ID | | |
| | | NO: 111 | | |
| | PR422 cDNA | optimized cDNA sequence | 140 | polynucleotide |
| | | encoding for protein with SEQ ID | | |
| | | NO: 112 | | |
| | PR424 cDNA | optimized cDNA sequence | 141 | polynucleotide |
| | | encoding for protein with SEQ ID | | |
| | | NO: 113 | | |
| | PR425 cDNA | optimized cDNA sequence | 142 | polynucleotide |
| | | encoding for protein with SEQ ID | | |
| | | NO: 114 | | |
| | PR426 cDNA | optimized cDNA sequence | 143 | polynucleotide |
| | | encoding for protein with SEQ ID | | |
| | | NO: 115 | | |
| | PR427 cDNA | optimized cDNA sequence | 144 | polynucleotide |
| | | encoding for protein with SEQ ID | | |
| | | NO: 116 | | |
| | PR428 cDNA | optimized cDNA sequence | 145 | polynucleotide |
| | | encoding for protein with SEQ ID | | |
| | | NO: 117 | | |
| | PR409 cDNA | optimized cDNA sequence | 146 | polynucleotide |
| | | encoding for protein with SEQ ID | | |
| | | NO: 118 | | |
| | PR415 cDNA | optimized cDNA sequence | 147 | polynucleotide |
| | | encoding for protein with SEQ ID | | |
| | | NO: 119 | | |
| | PR416 cDNA | optimized cDNA sequence | 148 | polynucleotide |
| | | encoding for protein with SEQ ID | | |
| | | NO: 120 | | |
| | PR413 cDNA | optimized cDNA sequence | 149 | polynucleotide |
| | | encoding for protein with SEQ ID | | |
| | | NO: 121 | | |
| | PR414 cDNA | optimized cDNA sequence | 150 | polynucleotide |
| | | encoding for protein with SEQ ID | | |
| | | NO: 122 | | |
| | PR417 cDNA | optimized cDNA sequence | 151 | polynucleotide |
| | | encoding for protein with SEQ ID | | |
| | | NO: 123 | | |
| | PR418 cDNA | optimized cDNA sequence | 152 | polynucleotide |
| | | encoding for protein with SEQ ID | | |
| | | NO: 124 | | |
| | PR65 cDNA | optimized cDNA sequence | 153 | polynucleotide |
| | | encoding for protein with SEQ ID | | |
| | | NO: 125 | | |
| | PR66 cDNA | optimized cDNA sequence | 154 | polynucleotide |
| | | encoding for protein with SEQ ID | | |
| | | NO: 126 | | |
| | PR67 cDNA | optimized cDNA sequence | 155 | polynucleotide |
| | | encoding for protein with SEQ ID | | |
| | | NO: 127 | | |
| | PR68 cDNA | optimized cDNA sequence | 156 | polynucleotide |
| | | encoding for protein with SEQ ID | | |
| | | NO: 128 | | |
| | PR405 cDNA | optimized cDNA sequence | 157 | polynucleotide |
| | | encoding for protein with SEQ ID | | |
| | | NO: 129 | | |
| | PR406 cDNA | optimized cDNA sequence | 158 | polynucleotide |
| | | encoding for protein with SEQ ID | | |
| | | NO: 130 | | |
| | PR407 cDNA | optimized cDNA sequence | 159 | polynucleotide |
| | | encoding for protein with SEQ ID | | |
| | | NO: 131 | | |
| | PR408 cDNA | optimized cDNA sequence | 160 | polynucleotide |
| | | encoding for protein with SEQ ID | | |
| | | NO: 132 | | |
| | F137 cDNA | optimized cDNA sequence | 161 | polynucleotide |
| | | encoding for protein with SEQ ID | | |
| | | NO: 133 | | |
| | Minimal Mouse/Rat/Human | aa(8-351) of PTEN-S; identical in | 162 | protein |
| | PTEN-S | rodents & primates | | |
| | Minimal Human Serum | aa(63-385) of SEQ ID NO: 13 | 163 | protein |
| | Albumin | | | |
| | Furin Sensitive Linker | TNRRKKRALDAAY | 164 | protein |
| | Sequence | | | |
| | MMP2/9-Sensitive Linker | GPAALKAA | 165 | protein |
| | Sequence | | | |
| | Mouse PTEN-S cDNA | optimized cDNA sequence | 166 | polynucleotide |
| | | encoding for protein with SEQ ID | | |
| | | NO: 88 | | |
| | Mature mouse PTEN-L cDNA | optimized cDNA sequence | 167 | polynucleotide |
| | | encoding for protein with SEQ ID | | |
| | | NO: 89 | | |
| | Wider Cell Penetration | cDNA of SEQ ID NO: 51 | 168 | polynucleotide |
| | Domain (WCPD) cDNA | | | |
| | Minimal Cell Penetration | cDNA of SEQ ID NO: 52 | 169 | polynucleotide |
| | Domain cDNA | | | |
| | Cell Penetration Domain* | cDNA of SEQ ID NO: 53 | 170 | polynucleotide |
| | (CPD*) cDNA | | | |
| | Human PTEN-L or pre-PTEN- | optimized cDNA sequence | 171 | polynucleotide |
| | L cDNA | encoding for protein with SEQ ID | | |
| | | NO: 1 | | |
| | Human PTEN-S cDNA | optimized cDNA sequence | 172 | polynucleotide |
| | | encoding for protein with SEQ ID | | |
| | | NO: 2 | | |
| | pTT5 mammalian expression | complete sequence of pTT5 | 173 | polynucleotide |
| | vector cDNA | empty vector | | |
| | L. plantarum expression | complete sequence of | 174 | polynucleotide |
| | vector cDNA | recombinant pSIP609-Lp2958- | | |
| | | PTEN-L (SEQ ID NO: 82) | | |
| | P. pastoris expression vector | complete sequence of | 175 | polynucleotide |
| | cDNA | recombinant SP(αMF)-PTEN-L | | |
| | | (SEQ ID NO: 85) | | |
| | cDNA of Mature Human | optimized cDNA sequence | 176 | polynucleotide |
| | Serum Albumin (HSA) | encoding for protein with SEQ ID | | |
| | | NO: 13 | | |
| | cDNA of Mature Simian | optimized cDNA sequence | 177 | polynucleotide |
| | Serum Albumin (SSA) | encoding for protein with SEQ ID | | |
| | | NO: 90 | | |
| | cDNA of Mature Rat Serum | optimized cDNA sequence | 178 | polynucleotide |
| | Albumin (RSA) | encoding for protein with SEQ ID | | |
| | | NO: 91 | | |
| | cDNA of Mature Mouse | optimized cDNA sequence | 179 | polynucleotide |
| | Serum Albumin (MSA) | encoding for protein with SEQ ID | | |
| | | NO: 92 | | |
| | cDNA of Signal Peptide of | optimized cDNA sequence | 180 | polynucleotide |
| | Human Serum Albumin | encoding for protein with SEQ ID | | |
| | | NO: 93 | | |
| | cDNA of Signal Peptide of | optimized cDNA sequence | 181 | polynucleotide |
| | Simian Serum Albumin | encoding for protein with SEQ ID | | |
| | | NO: 94 | | |
| | cDNA of Signal Peptide of | optimized cDNA sequence | 182 | polynucleotide |
| | Rat Serum Albumin | encoding for protein with SEQ ID | | |
| | | NO: 95 | | |
| | cDNA of Signal Peptide of | optimized cDNA sequence | 183 | polynucleotide |
| | Mouse Serum Albumin | encoding for protein with SEQ ID | | |
| | | NO: 96 | | |
| | cDNA of Signal Peptide of | optimized cDNA sequence | 184 | polynucleotide |
| | murine α2-macroglobulin | encoding for protein with SEQ ID | | |
| | | NO: 97 | | |
| | cDNA of Signal Peptide of | optimized cDNA sequence | 185 | polynucleotide |
| | murine fibrinogen | encoding for protein with SEQ ID | | |
| | | NO: 98 | | |
| | cDNA of Signal Peptide of | optimized cDNA sequence | 186 | polynucleotide |
| | murine α1-antitrypsin | encoding for protein with SEQ ID | | |
| | | NO: 99 | | |
| | cDNA of Signal Peptide of | optimized cDNA sequence | 187 | polynucleotide |
| | murine IgGκ chain | encoding for protein with SEQ ID | | |
| | | NO: 100 | | |
| | cDNA of Signal Peptide of | optimized cDNA sequence | 188 | polynucleotide |
| | human IgG heavy chain | encoding for protein with SEQ ID | | |
| | | NO: 101 | | |
| | cDNA of Signal Peptide of | optimized cDNA sequence | 189 | polynucleotide |
| | human IgGκ chain | encoding for protein with SEQ ID | | |
| | | NO: 102 | | |
| | cDNA of Human Siglec 3 | optimized cDNA sequence | 190 | polynucleotide |
| | (CD33) Signal Peptide | encoding for protein with SEQ ID | | |
| | | NO: 103 | | |
| | cDNA of Artificial Signal | optimized cDNA sequence | 191 | polynucleotide |
| | Peptide (Secrecon) | encoding for protein with SEQ ID | | |
| | | NO: 104 | | |
| | cDNA of Artificial Signal | optimized cDNA sequence | 192 | polynucleotide |
| | Peptide (Boosted Secrecon) | encoding for protein with SEQ ID | | |
| | | NO: 105 | | |
| | Mature human PTEN-L | optimized cDNA sequence | 193 | polynucleotide |
| | Unique Domain (LUD) cDNA | encoding for protein with SEQ ID | | |
| | | NO: 5 | | |
| | Human PTEN-M Unique | optimized cDNA sequence | 194 | polynucleotide |
| | Domain (MUD) cDNA | encoding for protein with SEQ ID | | |
| | | NO: 9 | | |
| | Human PTEN-N Unique | optimized cDNA sequence | 195 | polynucleotide |
| | Domain (NUD) cDNA | encoding for protein with SEQ ID | | |
| | | NO: 10 | | |
| | Human PTEN-O Unique | optimized cDNA sequence | 196 | polynucleotide |
| | Domain (OUD) cDNA | encoding for protein with SEQ ID | | |
| | | NO: 11 | | |
| | Minimal Mouse/Rat/Human | optimized cDNA sequence | 197 | polynucleotide |
| | PTEN-S cDNA | encoding for protein with SEQ ID | | |
| | | NO: 162 | | |
| | Human PTEN-M cDNA | optimized cDNA sequence | 198 | polynucleotide |
| | | encoding for protein with SEQ ID | | |
| | | NO: 6 | | |
| | Human PTEN-N cDNA | optimized cDNA sequence | 199 | polynucleotide |
| | | encoding for protein with SEQ ID | | |
| | | NO: 7 | | |
| | Human PTEN-O cDNA | optimized cDNA sequence | 200 | polynucleotide |
| | | encoding for protein with SEQ ID | | |
| | | NO: 8 | | |
| | Mouse PTEN-M | | 201 | protein |
| | Mouse PTEN-N | | 202 | protein |
| | Mouse PTEN-O | | 203 | protein |
| | Mouse PTEN-M cDNA | optimized cDNA sequence | 204 | polynucleotide |
| | | encoding for protein with SEQ ID | | |
| | | NO: 201 | | |
| | Mouse PTEN-N cDNA | optimized cDNA sequence | 205 | polynucleotide |
| | | encoding for protein with SEQ ID | | |
| | | NO: 202 | | |
| | Mouse PTEN-O cDNA | optimized cDNA sequence | 206 | polynucleotide |
| | | encoding for protein with SEQ ID | | |
| | | NO: 203 | | |
| | miR21 primer for Reverse | | 207 | polynucleotide |
| | Transcription (5′ > 3′) | | | |
| | miR21 forward primer (5′ > 3′) | | 208 | polynucleotide |
| | miR21 reverse primer (5′ > 3′) | | 209 | polynucleotide |
| | pAdEasy-1 complete sequence | | 210 | polynucleotide |
| | pAd(dps)ΔCU-IRES-E1A | | 211 | polynucleotide |
| | 47upF | | 212 | polynucleotide |
| | 47upR | | 213 | polynucleotide |
| | 47dnF | | 214 | polynucleotide |
| | 47dnR | | 215 | polynucleotide |
| | complementary linker 1 | | 216 | polynucleotide |
| | complementary linker 2 | | 217 | polynucleotide |
| | 345upF | | 218 | polynucleotide |
| | 345upR | | 219 | polynucleotide |
| | 345dnF | | 220 | polynucleotide |
| | 345dnR | | 221 | polynucleotide |
| | nivolumab scFv | | 222 | polynucleotide |
| PR41 | human pre-PTEN-L with a | | 223 | polynucleotide |
| | Met174Ile mutation | | | |
| PR41 | human pre-PTEN-L with a | | 224 | protein |
| | Met174Ile mutation | | | |
| | pHG52d34.5-CMV-PR41 | | 225 | polynucleotide |
| PR61Δ | SP(HSA)-HSA-PTEN-S | | 226 | polynucleotide |
| H | | | | |
| PR61Δ | SP(HSA)-HSA-PTEN-S | | 227 | protein |
| H | | | | |
| | pHG52d34.5-CMV-PR61 | | 228 | polynucleotide |
| PR71 | human pre-PTEN- | | 229 | polynucleotide |
| | L(Met174Ile)-GS-Fc | | | |
| PR71 | human pre-PTEN- | | 230 | protein |
| | L(Met174Ile)-GS-Fc | | | |
| | pHG52d34.5-CMV-PR71 | | 231 | polynucleotide |
| | nivolumab scFv | | 232 | protein |
| | pPiggyBac-dual promoter | | 233 | polynucleotide |
| | recombination vector | | | |
| | UL38p promoter sequence | | 234 | polynucleotide |
| | pembrolizumab scFv | | 235 | polynucleotide |
| | pembrolizumab scFv | | 236 | protein |
| | atezolizumab scFv | | 237 | polynucleotide |
| | atezolizumab scFv | | 238 | protein |
| | bevacizumab scFv | | 239 | polynucleotide |
| | bevacizumab scFv | | 240 | protein |
| | oHSV2- | | 241 | polynucleotide |
| | PR61Δ6H/ΔICP34.5/ΔICP47 | | | |
| | recombinant virus; full | | | |
| | genomic sequence | | | |
| | oHSV1-ΔICP34.5/ΔICP47 | | 242 | polynucleotide |
| | recombinant virus; full | | | |
| | genomic sequence | | | |

[0365] In some embodiments, linker sequences may be omitted or may comprise or even consist of epitope tags, selected of 6xHis (SEQ ID NO: 243), Flag hemagglutinin (HA) and other similar tags, as shown (FIG. 6A&Table 1).

[0366] In some embodiments, the aforementioned fusion PTEN proteins contain epitope tags. In other embodiments, the aforementioned fusion PTEN proteins contain no epitope tags.

[0367] Albumin is HSA, SSA, RSA or MSA selected of SEQ ID NO:12, 13 or SEQ ID NO:90-92, or SEQ ID NO:163, or an equivalent, deletion mutant, point mutant, analog or variant of each thereof.

[0368] PTEN is a PTEN protein selected of SEQ ID NO:2-3; or SEQ ID NO:6-8 or SEQ ID:88-89, or SEQ ID NO:162, or an equivalent, deletion mutant, point mutant, analog or variant of each thereof.

[0369] In one embodiment, the following PTEN-L variants were created: PR410 (SEQ ID NO:31; cDNA SEQ ID NO:71), PR411 (SEQ ID NO:32; cDNA SEQ ID NO:72), PR412 (SEQ ID NO:33; cDNA SEQ ID NO:73).

[0370] In another embodiment, the following N′-PTEN-L-Fc-C′ fusions were created: PR7 (SEQ ID NO:34; cDNA, 5′-PTEN-L-Fc-3′, SEQ ID NO:74), PR700 (SEQ ID NO:35; cDNA, 5′-PTEN-L-Fc-3′, SEQ ID NO:75).

[0371] In another embodiment, the following N′-Fc-PTEN-L-C′ fusion was created: PR8 (SEQ ID NO:36; cDNA, 5′-Fc-PTEN-L-3′, SEQ ID NO:76).

[0372] In another embodiment, the following N′-Thioredoxin-PTEN-L-C′ fusion was created: PR430 (SEQ ID NO:49; cDNA, 5′-Thioredoxin-PTEN-L-3′, SEQ ID NO:135)

[0373] In another embodiment, the following N′-albumin-PTEN-C′ fusions were created: PR1 (SEQ ID NO:14; cDNA, 5′-albumin-PTEN-3′, SEQ ID NO:54), PR2 (SEQ ID NO:15; cDNA, 5′-albumin-PTEN-3′, SEQ ID NO:55), PR3 (SEQ ID NO:16; cDNA, 5′-albumin-PTEN-3′, SEQ ID NO:56), PR5 (SEQ ID NO:17; cDNA, 5′-albumin-PTEN-3′, SEQ ID NO:57), PR63 (SEQ ID NO:21; cDNA, 5′-albumin-PTEN-3′, SEQ ID NO:61), PR64 (SEQ ID NO:22; cDNA, 5′-albumin-PTEN-3′, SEQ ID NO:62), PR31 (SEQ ID NO:23; cDNA, 5′-albumin-PTEN-3′, SEQ ID NO:63), PR32 (SEQ ID NO:24; cDNA, 5′-albumin-PTEN-3′, SEQ ID NO:64), PR33 (SEQ ID NO:25; cDNA, 5′-albumin-PTEN-3′, SEQ ID NO:65), PR34 (SEQ ID NO:50; cDNA, 5′-albumin-PTEN-3′, SEQ ID NO:136).

[0374] In another embodiment, the following N′-PTEN-L-albumin-C′ fusions were created: PR4 (SEQ ID NO:26; cDNA, 5′-PTEN-L-albumin-3′, SEQ ID NO:66), PR401 (SEQ ID NO:27; cDNA, 5′-PTEN-L-albumin-3′, SEQ ID NO:67), PR402 (SEQ ID NO:28; cDNA, 5′-PTEN-L-albumin-3′, SEQ ID NO:68), PR403 (SEQ ID NO:29; cDNA, 5′-PTEN-L-albumin-3′, SEQ ID NO:69), PR404 (SEQ ID NO:30; cDNA, 5′-PTEN-L-albumin-3′, SEQ ID NO:70). In a further embodiment, created is a fusion protein comprising a N′ terminal minimal PTEN domain and a C′ terminal albumin. In yet a further embodiment, the minimal PTEN domain comprises an amino acid sequence of SEQ ID NO: 162. Additionally or alternatively, the albumin is an HSA and the fusion protein further comprises an HSA signal peptide and a 6xHis tag (SEQ ID NO: 243).

[0375] In another embodiment, the following N′-PTEN-L-albumin-C′ fusions were created: PR419 (SEQ ID NO:109; cDNA, 5′-PTEN-L-albumin-3′, SEQ ID NO:137), PR420 (SEQ ID NO:110; cDNA, 5′-PTEN-L-albumin-3′, SEQ ID NO:138), PR421 (SEQ ID NO:111; cDNA, 5′-PTEN-L-albumin-3′, SEQ ID NO:139), PR422 (SEQ ID NO:112; cDNA, 5′-PTEN-L-albumin-3′, SEQ ID NO:140), PR424 (SEQ ID NO:113; cDNA, 5′-PTEN-L-albumin-3′, SEQ ID NO:141), PR425 (SEQ ID NO:114; cDNA, 5′-PTEN-L-albumin-3′, SEQ ID NO:142), PR426 (SEQ ID NO:115; cDNA, 5′-PTEN-L-albumin-3′, SEQ ID NO:143), PR427 (SEQ ID NO:116; cDNA, 5′-PTEN-L-albumin-3′, SEQ ID NO:144), PR428 (SEQ ID NO:117; cDNA, 5′-PTEN-L-albumin-3′, SEQ ID NO:145), PR409 (SEQ ID NO:118; cDNA, 5′-PTEN-L-albumin-3′, SEQ ID NO:146), PR415 (SEQ ID NO:119; cDNA, 5′-PTEN-L-albumin-3′, SEQ ID NO:147), PR416 (SEQ ID NO:120; cDNA, 5′-PTEN-L-albumin-3′, SEQ ID NO:148), PR413 (SEQ ID NO:121; cDNA, 5′-PTEN-L-albumin-3′, SEQ ID NO:149), PR414 (SEQ ID NO:122; cDNA, 5′-PTEN-L-albumin-3′, SEQ ID NO:150), PR417 (SEQ ID NO:123; cDNA, 5′-PTEN-L-albumin-3′, SEQ ID NO:151), and PR418 (SEQ ID NO:124; cDNA, 5′-PTEN-L-albumin-3′, SEQ ID NO:152).

[0376] In another embodiment, the following N′-albumin-PTEN-C′ fusions were created: PR6 (SEQ ID NO:18; cDNA, 5′-albumin-PTEN-3′, SEQ ID NO:58), PR61 (SEQ ID NO:19; cDNA, 5′-albumin-PTEN-3′, SEQ ID NO:59), PR62 (SEQ ID NO:20; cDNA, 5′-albumin-PTEN-3′, SEQ ID NO:60), PR66 (SEQ ID NO:126; cDNA, 5′-albumin-PTEN-3′, SEQ ID NO:154), PR67 (SEQ ID NO:127; cDNA, 5′-albumin-PTEN-3′, SEQ ID NO:155) and PR68 (SEQ ID NO:128; cDNA, 5′-albumin-PTEN-3′, SEQ ID NO:156). In a further embodiment, created is a fusion protein comprising a N′ terminal albumin and a C′ terminal minimal PTEN domain. In yet a further embodiment, the minimal PTEN domain comprises an amino acid sequence of SEQ ID NO: 162. Additionally or alternatively, the albumin is an HSA and the fusion protein further comprises an HSA signal peptide and a 6xHis tag (SEQ ID NO: 243).

[0377] In another embodiment, the following N′-PTEN-S-albumin-C′ fusion was created: PR65 (SEQ ID NO:125; cDNA, 5′-PTEN-S-albumin-3′, SEQ ID NO:153).

[0378] In another embodiment, the following N′-PTEN-S-albumin-PTEN-S-C′ fusion was created: PR911 (SEQ ID NO:37; cDNA, 5′-PTEN-S-albumin-PTEN-S-3′, SEQ ID NO:77).

[0379] In another embodiment, the following N′-PTEN-L-albumin-C′ fusions were created: PR405 (SEQ ID NO:129; cDNA, 5′-PTEN-L-albumin-3′, SEQ ID NO:157), PR406 (SEQ ID NO:130; cDNA, 5′-PTEN-L-albumin-3′, SEQ ID NO:158), PR407 (SEQ ID NO:131; cDNA, 5′-PTEN-L-albumin-3′, SEQ ID NO:159) and PR408 (SEQ ID NO:132; cDNA, 5′-PTEN-L-albumin-3 SEQ ID NO:160).

[0380] In another embodiment, the following N′-albumin-LUD-p53-C′ fusion was created: F131 (SEQ ID NO:38; cDNA, 5′-albumin-LUD-p53-3′, SEQ ID NO:78).

[0381] In another embodiment, the following N′-LUD-p53-albumin-C′ fusion was created: F137 (SEQ ID NO:133; cDNA, 5′-LUD-p53-albumin-3′, SEQ ID NO:161).

[0382] All cDNAs of mammalian PTEN-albumin fusions were sequence-optimized (e.g. SEQ ID 54-78;135-161; 172-179; see FIG. 6 and Table 1), chemically synthesized, sequenced to confirm identity and subcloned as unique EcoRI-HindIII fragments between the EcoRI-HindIII sites of pTT5 (SEQ ID NO:173; FIG. 6C; Durocher & Loignon, 2009:patents.google.com/patent/U.S. Pat. No. 8,637,315). All these operations were performed by GensScript, Inc. Piscataway, New Jersey.

[0383] In one example, the HSV-1 strain 17 [152, 222 bp; NCBI Reference Sequence: NC_001806.2; National (UK) Collection of Pathogenic Viruses, catalog #0104151v] is used to create a recombinant oncolytic HSV-1 deprived of both ICP47 and ICP34.5 virulent HSV genes and carrying the albumin-PTEN fusion cDNAs disclosed herein (for example, SEQ ID NO:54-70, 74-77, 135-160, see also FIG. 6D). Initially, the virulent ICP47 gene encoding an MHCI-CD8(+) inhibitor is removed by two consecutive homologous recombination events. To that end, the upstream (up) and downstream (dn) flanking regions of the HSV-1 genome are PCR-amplified using the primer pairs 47upF (SEQ ID NO:212) & 47upR (SEQ ID NO:213) and 47dnF (SEQ ID NO:214) & 47dnR (SEQ ID NO:215), wherein the PCR products are subsequently digested with EcoRI/SpeI and HindIII-SalI, respectively. Complementary linkers (for example, SEQ ID NO:216-217) are then used to stitch the two flanking regions together between the EcoRI and SalI sites of the large pBSSK vector fragment, leading to the creation of plasmid pA47. The small EcoRI-XhoI fragment of pcDNA3.1-eGFP (Nova Lifetech, Hong Kong, catalog #PVT10754) containing the 239aa ORF of Green Fluorescent Protein (GFP) and the CMV5 promoter is then blunt end-ligated into the EcoRV site of pΔ47 to create pΔ47-eGFP. The HSV-1/17+strain viral DNA and pΔ47-eGFP are then co-transfected into BHK cells to allow for the first HSV recombination, whereby ICP47 is replaced with eGFP to generate the HSV-1/17/Δ47-eGFP virus (FIG. 6D). The latter is plaque-purified 4 times, wherein 4-6 single plaques are picked and confirmed for eGFP expression under the fluorescent microscope each time. HSV-1/17/Δ47-eGFP is then recombined for a second time as above but now using the pΔ47 plasmid instead, which leads to the elimination of eGFP from the second round progeny virus, rendering it devoid of ICP47 (HSV-1/17/Δ47 virus; FIG. 6D). To delete the second virulent gene, ICP34.5, which is the main determinant of HSV neuro pathogenicity, the corresponding upstream (up) and downstream (dn) flanking regions of the HSV-1 genome are PCR-amplified using primer pairs 345upF (SEQ ID NO:218) and 345upR (SEQ ID NO:219) and 345dnF (SEQ ID NO:220) & 345dnR (SEQ ID NO:221), respectively, wherein the PCR products are then joined with overlapping PCR using the primer pair 345upF and 345dnR (SEQ ID NO:218, 221) and subsequently inserted into the large, blunt end-converted BamHI-XhoI pSP72 (Promega) vector fragment to create plasmid 034.5. The small EcoRI-XhoI fragment of pcDNA3.1-eGFP is then inserted into 034.5 to create pΔ34.5-eGFP. Similarly, the small SpeI-HindIII fragment of an albumin-PTEN fusion [containing the pTT5 CMV5 promoter region and each albumin-PTEN cDNA that is cloned between EcoRI-HindIII sites of pTT5) (see FIG. 6C)] is inserted into 034.5 to create pΔ34.5-PRn, wherein n corresponds a PR protein selected from SEQ ID NO:14-30, 34-37, 49-50 and 109-132, as disclosed herein (whereby for example, pΔ34.5-PR402 contains the cDNA of SEQ ID NO:68 and expresses the PR402 protein with SEQ ID NO:28, pΔ34.5-PR61 contains the cDNA of SEQ ID NO:59 and expresses the PR61 protein with SEQ ID NO:19, and so on). The HSV-1/17/Δ47 virus from the previous step is then subjected to two sequential recombination rounds. First, HSV-1/17/Δ47 viral DNA is recombined with pΔ34.5-eGFP to knock-in eGFP into the ICP34.5 locus, thereby creating HSV-1/17/Δ47/Δ34.5-eGFP virus (FIG. 6D). Following plaque-purification (4 times, wherein 4-6 single plaques are picked and confirmed for eGFP expression under the fluorescent microscope), as above, the HSV-1/17/Δ47/Δ34.5-eGFP virus is recombined with pΔ34.5-PRn to create the final recombinant oncolytic virus, HSV-1/17/Δ47/Δ34.5-PRn (FIG. 6D). The latter virus is assessed for transgene expression following infection in 4T1, MDAMB468, PC3 and other cells, and identification of the encoded protein using WB or activity-based assays, as it is known in the art and/or described herein. In one embodiment, the albumin-PTEN transgene of the recombinant HSV-1 Δ47/Δ34.5 albumin-PTEN virus is a polynucleotide selected from SEQ ID NO: 14-30, 34-37, 49-50 and 109-132. In another embodiment, the recombinant oncolytic HSV is constructed using CRISPR or TALEN methodology. In one embodiment, the virus is HSV-1. In another embodiment the HSV virus is HSV-2, which can be manipulated exactly as shown above (Zhao et al, 2014; PMID: 24671154). In another embodiment, the PTEN albumin fusion cDNA to be expressed by the recombinant oncolytic HSV virus has an N-terminal signal peptide cDNA selected of [nt (1-63) of SEQ ID NO: 171 or SEQ ID NO: 180-192]. In another embodiment the PTEN albumin fusion to be expressed has no signal peptide but an ATG codon for an initiator methionine residue is placed upstream of either mature albumin cDNA (selected from SEQ ID NO:176-179) or mature PTEN-L cDNA [selected from SEQ ID NO:167 or nucleotide (nt) 64-nt 1728 of SEQ ID NO:171], respectively, as appropriate. In another embodiment, the PTEN albumin fusion to be expressed has no signal peptide but an ATG codon for an initiator methionine replaces the first residue of mature albumin cDNA (selected from SEQ ID NO:176-179) or of mature PTEN-L cDNA [selected from SEQ ID NO:167 or nucleotide (nt) 64-nt 1728 of SEQ ID NO:171], as appropriate. In another embodiment, the recombinant oncolytic HSV virus carries/comprises one albumin-PTEN fusion cDNA selected of SEQ ID NO:54-70, 74-77, 135-160. In another embodiment the virus carries/comprises two or more albumin fusion cDNAs selected of SEQ ID NO:54-70, 74-77, 78, 135-160, 161. In a further embodiment, the recombinant oncolytic HSV virus carries/comprises one albumin-PTEN fusion cDNA selected of SEQ ID NO:54-70, 74-77, 135-160 and one PTEN cDNA selected of SEQ ID NO:71-73, 171-172, 166-167, 198-200, 204-206. In other embodiments, the recombinant virus carries/comprises one albumin-PTEN fusion cDNA and the cDNA of a heterologous protein, such as a monoclonal antibody, including a checkpoint antibody.

### Example 1. Generation of Industrially Relevant PTEN-L& PTEN-S Human Serum Albumin Fusions

[0384] Materials & Methods

[0385] pTT5-based albumin PTEN fusion expression vectors were transiently transfected in HEK293, HEK293-6E or industrial grade Chinese Hamster Ovary (CHO-3E7) cells (Durocher & Loignon, 2009:patents.google.com/patent/U.S. Pat. No. 8,637,315). Both cell lines secrete the fusion proteins in the conditioned medium. Cells were grown in suspension in serum- and protein-free F17 synthetic medium (3 ml total volume) at 32° C. for up to 6 days post-transfection (dpt). The supernatant was sampled and cell viability assessed with Accumax every 24 h or as indicated. CHO-3E7 viability systematically exceeded 75% for all transient transfections under these conditions, whereas HEK293 was variable and influenced by the vector to be expressed, yet always above 65% at 5 dpt. Cell- and cell debris-free conditioned medium was loaded on 8-12% gradient SDS-PAGE as such. Gel-bound proteins were transferred onto a nitrocellulose membrane, which was firstly stained with Ponceau and then blotted with one the following primary antibodies (FIG. 6B):

[0386] Anti-PTEN Antibodies:
[0387] a. Clone F-1 (Santa Cruz Biotech; catalog #sc-393186). According to the manufacturer, the mouse mAb F-1 binds aa(3-29) of human PTEN-S(SEQ ID NO:2). Because this region is identical in all mammalian PTEN-Ss, F-1 is a pan-PTEN mAb that can interact with all mammalian PTEN-L and PTEN-S proteins.
[0388] b. Clone A2B1 (Santa Cruz Biotech; catalog #sc-7974); According to the manufacturer, A2B1 was raised against aa(388-400) of human PTEN-S and is recommended for detection of human, mouse and rat PTEN-S. It is noted however, that while simiam and human PTEN-S are identical, the rodent PTEN-S has a T398S mutation (which is nevertheless a very conservative substitution). Thus, the A2B1 mouse mAb is likely a pan-PTEN Ab, being able to interact with both human, simian and most likely, mouse and rat PTEN-L and PTEN-S.
[0389] c. Clone 138G6 (Cell Signaling; catalog #9556). The manufacturer does not disclose the exact target epitope of this rabbit mAb. However, Mingo et al, 2019 (PMID: 30993208) demonstrated 138G6 binds aa(388-394) of human PTEN-S. This region is conserved among mammalian PTENs. Hence, 138G6 is a pan-PTEN mAb.
[0390] d. Clone SP218 (AbCam; catalog #ab228466P). The manufacturer does not disclose the target epitope of this rabbit mAb. However, Mingo et al, 2019 (PMID: 30993208) demonstrated SP218 binds aa(394-402) of human PTEN-S. This region spans the rodent PTEN-S T398S mutation. Hence, SP218 is a pan-human & simian PTEN mAb, which most likely interacts with mouse and rat PTEN-L and PTEN-S as well.
[0391] e. Clone 17.A (ThermoFisher; catalog #MA5-12278). The manufacturer does not disclose the target epitope of this mouse mAb. However, Mingo et al, 2019 (PMID: 30993208) demonstrated 17.A binds aa(392-402) of human PTEN-S. This region spans the rodent PTEN-S T398S mutation. However, according to the manufacturer, 17.A reacts with both mouse and human PTEN-S, suggesting it is a pan-human & simian PTEN mAb, which most likely interacts with mouse and rat PTEN-L and PTEN-S as well.
[0392] f. Clone 3A4.1 (Sigma Aldrich; catalog #MABS1680). This is a mouse mAb raised against the human LUD (SEQ ID NO:5) fused to GST and expressed in bacteria. The manufacturer does not disclose the target epitope. However, they claim 3A4.1 binds human PTEN-L; this means 3A4.1 also binds simian PTEN-L (which only has 1 mutation within the LUD, G116). It is nevertheless unknown whether 3A4.1 it would bind rodent PTEN-L, whereas it would of course not bind any PTEN-S.

[0393] Anti-Albumin Antibodies
[0394] g. Clone AL-01 (ThermoFisher; catalog #MA1-19174). While the manufacturer does not disclose the target epitope of this mAb, they claim it is specific for HSA. The Applicant found that AL-01 can interact with PR413 [containing aa(1-385) of HSA; SEQ ID NO:121; cDNA SEQ ID:149)] but not PR414 (containing aa(1-197) of HSA; SEQ ID NO:122; cDNA SEQ ID NO:150). This suggests that the binding site of AL-01 is within [aa(362-375)] or domain II of HSA, a region which is very divergent between HSA (SEQ ID NO:13) and MSA (SEQ ID NO:92). Hence, AL-01 is a dII-binding, HSA-specific mAb.
[0395] h. Clone F-10 (Santa Cruz Biotech; catalog #sc-271605). According to the manufacturer, F-10 binds with aa(39-164), that is domain I of HSA. The manufacturer recommends usage of F-10 to also detect MSA and RSA. However, alignment of the HSA (SEQ ID NO:13) with SSA (SEQ ID NO:90) indicates there are only 3 divergent residues between aa(39-164) of SSA and HSA. Thus, F-10 is most likely a pan-albumin mAb that binds domain I of all mammalian albumins.

[0396] Anti-6xHis antibodies (SEQ ID NO: 243). Two such clones were used herein: one from the Canadian National Research Council (Montreal, Quebec; in-house clone) and one from GenScript, Inc. (Piscataway, New Jersey; catalog number #A00186), with very similar results.

[0397] The working dilutions of the mAbs were 1:100-1:1000, depending on the application (WB, IP), as indicated. In some embodiments, the secondary Ab was HRP-conjugated (FIG. 6B). Appropriate secondary antibodies were used at a 1:1000 dilution.

[0398] Results

[0399] In line with previous reports that PTEN-L is secreted in minute amounts in the culture supernatant, from which it can be detected only after concentration (Hopkins et al, 2013: PMID: 23744781), C-terminally 6xHis-tagged human PTEN-L (“6xHis-tag” disclosed as SEQ ID NO: 243) [PR410 (SEQ ID NO:31; cDNA SEQ ID NO:71) or PR411 (SEQ ID NO:32; cDNA SEQ ID NO:72)] was essentially not expressed/(-able) in industrial grade CHO-3E7 cells. Indeed, the protein was only barely, if at all, detectable by WB of the uncondensed culture medium, regardless of whether an albumin or an immunoglobulin leader drove secretion (FIG. 7; PTEN blots; observe PTEN-L at around 75 KDa in lanes 9-10 but not 13 of the overexposed WB). Mutation of the PTEN-M, N and O translational initiator residues, which, according to a report (Tzani et el, 2016: PMID: 27249819) may shift ribosome binding to the upstream leucine initiator of PTEN-L, thereby potentially increasing PTEN-L expression (PR412, SEQ ID NO:33; cDNA SEQ ID NO:73) did not help either (FIG. 7, lane 11 of the PTEN WBs). Under these conditions, the concentration of PR410, PR411 and PR412 in the CHO-3E7 culture supernatant was estimated to be well below 1 ng/ml. In contrast, cells secreted high amounts of other PTEN fusions such as PR61 (SEQ ID NO:19; cDNA SEQ ID NO:59) and PR32 (SEQ ID NO:24; cDNA SEQ ID NO:64) (see later), thereby demonstrating they were fit for purpose. Thus, wild-type (unfused) human PTEN-L cannot be meaningfully manufactured industrially by CHO cells.

[0400] Addition of the immunoglobulin Fc tail sequence is a useful way to stabilize biologics. However, inclusion of Fc at its“natural” C-term position resulted in a PTEN-L fusion protein (PR7; SEQ ID NO:34; cDNA SEQ ID NO:74) that is indeed reproducibly detectable (FIG. 8B, overexposed WB, lanes 10-12 vs. 17-18; 80 KDa and FIG. 7; lane 8 vs. 13), yet not at all manufacturable (FIG. 8B, Ponceau, lanes 10-12; note that the 72 KDa and 77 KDa bands seen in lanes 9-11 are actually non-specific because the same exist in the mock-treated HEK293 supernatants; lane 17). Similarly, an ADCC-deficient PR7 variant bearing the N297Q mutation (PR700; SEQ ID NO:35; cDNA SEQ ID NO:75) is not expressed better than PR7 (FIG. 7, lanes 8, 12 and 13). In addition, PR7 (SEQ ID NO:34; cDNA SEQ ID NO:74) shows no improved expression over wild-type like PTEN-L (PR410-12; SEQ ID NO:31-33) (FIG. 7, lanes 8-13), suggesting that addition of the Fc tail at the 3′ prime of PTEN-L is futile. Likewise, introduction of the Fc in the inverse orientation (PR8; SEQ ID NO:36; cDNA SEQ ID NO:76) reduces expression even further to almost undetectable levels (FIG. 8B; lanes 9-18). Again, cells secreted high amounts of PR6 (SEQ ID NO:18; cDNA SEQ ID NO:58)(FIG. 8B, Ponceau staining, lane 8), thereby demonstrating they were fit for purpose. Thus, addition of Fc in either orientation does not stabilize PTEN-L at all and cannot provide for industrially relevant manufacturing of the tumor suppressor.

[0401] Because Rubartelli & Sitia R, 1991 (PMID: 1889608) had shown that IL-1 and thioredoxin (Trx-1) may be secreted by normal cells via a non-canonical pathway (i.e. without any signal peptide leader); Trx-1 is known to interact with PTEN-S (Meuillet et al, 2004; PMID: 15313215); and Trx-1 fusion upstream of the PTEN-L coding sequence may partially stabilize the protein in insect cells (FIG. 5), the Applicant constructed the PR430 fusion (SEQ ID NO:49; cDNA SEQ ID NO:135). However, unlike PR61 (SEQ ID NO:19; cDNA SEQ ID NO:59) and PR402 (SEQ ID NO:28; cDNA SEQ ID NO:68)(see below), PR430 (SEQ ID NO:49; cDNA SEQ ID NO:135) cannot be secreted in CHO supernatants either (FIG. 9). Under these conditions, PR61 was expressed at much higher levels than PR402 (see also FIG. 7).

[0402] The Applicant then constructed a series of albumin PTEN fusions by joining pre-protein HSA (SEQ ID NO:12) upstream of PTEN-M to create PR1 (SEQ ID NO:14; cDNA SEQ ID NO:54), PR2 (SEQ ID NO:15; cDNA SEQ ID NO:55), PR3 (SEQ ID NO:16; cDNA SEQ ID NO:56) and PR5 (SEQ ID NO:17; cDNA SEQ ID NO:57), or upstream of PTEN-S to create PR6; (SEQ ID NO:18; cDNA SEQ ID NO:58), respectively. Applicant also constructed the inverse mutant PR4 (SEQ ID NO:26; cDNA SEQ ID NO:66), in which PTEN-L precedes the processed, secreted form of HSA (SEQ ID NO:13). PR1-4 were first expressed in HEK293 and CHO-3E7 cells and proteins assayed in culture supernatants by WB using an anti-His antibody (FIG. 8A). Industrial grade CHO-3E7 cells secreted more total exogenous PR proteins than HEK293 cells in almost all cases studied, except for PR4 (SEQ ID NO:26; cDNA SEQ ID NO:66) the expression of which was essentially identical between HEK293 and CHO-3E7 (FIG. 8A; lanes A-C vs D). All N-terminal HSA fusions (PR1-3) migrated at the expected MW of 120-130 KDa (FIG. 7, His blot, longer exposure), yet underwent extensive degradation into 1 or 2 major bands of 60-70 KDa (FIG. 8A, Ponceau); one of these 60-70 KDa degradants is HSA, because it is picked up by the C-terminal His epitope tag antibody (FIG. 8A, His blot). PR5, which is similar to PR1-3, also undergoes extensive degradation in both HEK293 and CHO-3E7 cells (FIG. 8B). In contrast, and much to the Applicant's surprise, PR4, which initiates with PTEN-L and ends with mature HSA at the C′ prime (SEQ ID NO:26; cDNA SEQ ID NO:66) is more stable than PR1-3 and PR5, though still also being degraded to a considerable extent (FIG. 8A). Even more paradoxically, PR6 (SEQ ID NO:18; cDNA SEQ ID NO:58), whose domain structure resembles PR1-3 & PR5 was degraded only marginally, if at all, and was expressed in very high amounts (FIG. 8B, Ponceau; lanes 5-8 vs. 17-18; note that PR6 is HA-tagged and hence does not crossreact with the anti-His mAb WB in FIG. 8B lane 8).

[0403] These results suggested that PR4 (SEQ ID NO:26; cDNA SEQ ID NO:66) and especially PR6 (SEQ ID NO:18; cDNA SEQ ID NO:58) could be manufacturable to industrially relevant levels. Applicant hence created variants of both PR4 and PR6. First of all, the acidic HA epitope tag found at the C-term of PR6 (SEQ ID NO:18; cDNA SEQ ID NO:58) was replaced with a 6xHis tag (SEQ ID NO: 243) to create PR61 protein fusion (SEQ ID NO:19; cDNA SEQ ID NO:59). Moreover, it was hypothesized that the partial proteolysis of PR4 might be due to the existence of a MMP2/9 & furin-sensitive linker (SEQ ID NO:48) on the PR4 protein. Along this idea, proteases released upon cell death during culture would attack PR4 on its linker SEQ ID NO:48; such proteolysis is a well known problem in the art. Accordingly, the HA tag and SEQ ID NO:48 were removed from PR4, whereas the 6xHis tag (SEQ ID NO: 243) was placed at the end, resulting in the creation of PR402 (SEQ ID NO:28; cDNA SEQ ID NO:68).

[0404] Sequence-optimized cDNAs corresponding to PR61 and PR402 (SEQ ID NO:59 and 68, respectively) were cloned into pTT5 (cDNA SEQ ID NO:173; FIG. 6C) and the recombinant vectors transiently transfected in CHO-3E7 cells. The results demonstrated that while there was still some degradation of PR402 (FIG. 7; anti-PTEN & HSA blots; lane 7), a substantial portion of PR402 (SEQ ID NO:28; cDNA SEQ ID NO:68) could now be secreted in the culture supernatant at the expected MW of about 130 KDa, in what apparently constitutes moderate, yet overall industrially relevant full-length PR402 levels (FIG. 7; esp. Ponceau stainings; lane 7 vs. 13). Similarly, and as expected from Applicant's results with PR6, PR61 (SEQ ID NO:19; cDNA SEQ ID NO:59) contributed an excellent absolute level of expression, having now become detectable also with anti-6xHis (SEQ ID NO: 243) (FIG. 7; WB and esp. Ponceau stainings; lane 1 vs. 13). In both cases, the absolute levels of both PR402 (SEQ ID NO:28; cDNA SEQ ID NO:68) and PR61 (SEQ ID NO:19; cDNA SEQ ID NO:59) were much higher than those contributed by all unfused PTEN-L variants and both PTEN-L/Fc fusions (FIG. 7; esp. Ponceau stainings; lane 1, 7 vs. 8-13), wherein PR61 was once again expressed at much higher levels than PR402 (see also FIG. 9).

[0405] Another conclusion that was drawn from FIG. 8A is that inclusion of the PTEN-M-Unique Domain (MUD; SEQ ID NO:9) at the N′ of PR6 collapses the quite stable PR6 protein onto a rather unstable PR3 (SEQ ID NO:16; cDNA SEQ ID NO:56) fusion. Such a profile is consistent with intracellular or cell-debris-derived proteolytic activity targeting the MUD and by extension the LUD (SEQ ID NO:5). If so, then progressive addition of LUD sequences onto PR6 or PR61 should render the latter sensitive to proteases. Indeed, integration of SEQ ID NO:51 linker, [which corresponds to aa(43-79) of the LUD and is defined as the wider cell-penetration domain (WCPD)], in frame between the HSA and PTEN-S moieties of PR61 was sufficient to render the resulting fusion, PR31 (SEQ ID NO:23; cDNA SEQ ID NO:63), sensitive to degradation (FIG. 7; especially Ponceau stainings; lanes 1, 3 and 13). Because Leu43 of PTEN-L (SEQ ID NO:1) is also the initiator amino acid of PTEN-N(SEQ ID NO:7), just upstream of the Arg-rich MCPD, it can be anticipated that like PR31, an HSA-PTEN-N fusion is susceptible to proteolysis as well. Similarly, addition of CPD*sequence [SEQ ID NO:53, which is a short version of WCPD and corresponds to aa(44-59) of the LUD], is sufficient to render the resulting fusion, PR63 (SEQ ID NO:21; cDNA SEQ ID NO:61), sensitive to degradation as well (FIG. 7; especially Ponceau stainings; lanes 1-2 vs. 13). Thus, fusion of WCPD (SEQ ID NO:51) linker as a whole or of deletion mutants thereof, such as the CPD* (SEQ ID NO:53) or most likely just the minimal 6Arg portion (aka the MCPD; SEQ ID NO:39), between the HSA and PTEN-S moieties of PR6 or PR61, renders the resulting fusions sensitive to an MCPD-targeting protease, such as furin, which targets Arg-rich sequences (Tian et al, 2016; PMID: 21541042). Hence, WCPD-containing fusions, such as PR31 (SEQ ID NO:23; cDNA SEQ ID NO:63) and PR63 (SEQ ID NO:21; cDNA SEQ ID NO:61) are essentially non-manufacturable. In contrast, when the linker to be fused in frame between the two PR61 moieties contains consecutive amino acids of SEQ ID NO:52, the resulting fusions, such as PR32 (SEQ ID NO:24; cDNA SEQ ID NO:64) and PR33 (SEQ ID NO:25; cDNA SEQ ID NO:65) are protected from cleavage and hence are fully manufacturable (FIG. 7; especially Ponceau stainings; lanes 1 vs. 4-Sand 13).

[0406] That the Arg-rich, CPD* sequence (SEQ ID NO:53; cDNA SEQ ID NO:170) confers sensitivity to a furin-like protease was also confirmed by engineering PR402 variants containing the CPD*, namely PR401 (SEQ ID NO:27; cDNA SEQ ID NO:67), PR403 (SEQ ID NO:29; cDNA SEQ ID NO:69) and PR404 (SEQ ID NO:30; cDNA SEQ ID NO:70). Indeed, as opposed to PR402 (SEQ ID NO:28; cDNA SEQ ID NO:68), which is predominantly protected from furin-like degradation, PR401, PR403 and PR404 were degraded completely in the CHO-3E7 supernatants (FIG. 10).

[0407] Because of this unexpected resistance of PR402 (SEQ ID NO:28; cDNA SEQ ID NO:68) to furin-like degradation, the Applicant wondered whether inhibition of this protease might render the PR3 mutant (SEQ ID NO:16; cDNA SEQ ID NO:56) manufacturable as well. To that end, both non-specific and specific protease inhibitors were tested. FIG. 11A shows that non-specific protease inhibitors like ferric citrate or protease inhibitor tablets have a marginal protective effect on PR3 (SEQ ID NO:16; cDNA SEQ ID NO:56) and PR5 (SEQ ID NO:17; cDNA SEQ ID NO:57) initially (WB anti-PTEN; 3-4 dpt), which then, as the culture continues, is unfortunately progressively lost (Ponceau staining; 4-5 dpt). In contrast, PR6 (SEQ ID NO:18; cDNA SEQ ID NO:58) is insensitive to both protease inhibitor treatments and hence its expression increases over time (FIG. 11A, WB anti-PTEN; non-saturated image and FIG. 11A; lanes 1-18). Treatment of the cultures with a cell-permeable furin catalytic center peptide inhibitor (Calbiochem/Merck Millipore #344930) indeed increased the amount of full length PR3 (SEQ ID NO:16; cDNA SEQ ID NO:56) produced by cells both at 2 dpt and 6 dpt (FIG. 11B; lanes 1-6 vs. 13-18), though a reduction of cell viability was noted (FIG. 11B, legend). In contrast, and as expected again by Applicant's results, expression of PR6 (SEQ ID NO:18; cDNA SEQ ID NO:58) was insensitive to the furin inhibitor and increased over time (FIG. 11B; lanes 7-18). Consistent with furin mediating the cleavage of the albumin-PTEN-L fusions, when full length PR1 protein (SEQ ID NO:14; cDNA SEQ ID NO:54) made in large amounts was excised from the gel and sequenced by LC/MS, a cleavage site between 2 arginine residues in the furin consensus sequence could be mapped (FIG. 11C). Finally, genetic deletion of the putative furin cleavage site, that is of the MCPD, from PR3, resulted in a mutant (PR34; SEQ ID NO:50; cDNA SEQ ID NO:136) that is protected from cleavage (FIG. 11D). These results demonstrate that furin or a furin-like protease cleaves the LUD (SEQ ID NO:5), most likely within the 6-Arg Minimal Cell Penetration Domain (SEQ ID NO:39).

[0408] The cell line provider Horizon Discovery sells a knock-out HAP1 stable cell line, whereby CRISPR/Cas editing has been used to create a 2 bp deletion in a coding exon of Furin, leading to the loss of protein in these cells (Catalog ID: HZGHC001302c001). This indicates that generation of a mammalian furin knock out cell line is possible in the absolute sense. As such, based on the Applicants disclosure, it would be straightforward for a skilled person to generate a CHO-3E7 or HEK293 furin knock out derivative and demonstrate that secretion of PTEN-L fusions[including but not limited to PR3 (SEQ ID NO:16; cDNA SEQ ID NO:56), PR63 (SEQ ID NO:21; cDNA SEQ ID NO:61), PR31 (SEQ ID NO:23; cDNA SEQ ID NO:63), PR62 (SEQ ID NO:20; cDNA SEQ ID NO:60); (see FIG. 7, Ponceau stainings)] would be increased in the resulting furin knock out cell line.

[0409] To assess the impact of various signal peptides on the expression levels of PR402, the HSA Signal Peptide (SEQ ID NO:93) of PR402 was replaced with the Signal Peptides of proteins known to be secreted in large amounts in human plasma (Table 1; SEQ ID NO:97-105). As such, PR419 (SEQ ID NO:109; cDNA SEQ ID NO:137), PR420 (SEQ ID NO:110; cDNA SEQ ID NO:138), PR421 (SEQ ID NO:111; cDNA SEQ ID NO:139), PR422 (SEQ ID NO:112; cDNA SEQ ID NO:140), PR424 (SEQ ID NO:113; cDNA SEQ ID NO:141), PR425 (SEQ ID NO:114; cDNA SEQ ID NO:142), PR426 (SEQ ID NO:115; cDNA SEQ ID NO:143), and PR427 (SEQ ID NO:116; cDNA SEQ ID NO:144), were created. The mouse equivalent of PR402 consisting of mouse PTEN-L, MSA driven by the MSA signal peptide was also constructed (PR428; SEQ ID NO:117; cDNA SEQ ID NO:145). The corresponding expression vectors were transiently transfected in HEK293 cells and foreign proteins in the culture supernatant were detected by SDS-PAGE (FIG. 12A). All Signal Peptides were found to direct detectable amounts of mature PR402. However, the native HSA (SEQ ID NO:93), the murine al-antitrypsin (SEQ ID NO:99), the murine IgGκ chain (SEQ ID NO:100) and, expectedly, the MSA Signal Peptide (SEQ ID NO:96) appeared to best out all others in terms of total secreted protein as estimated by visual inspection of the gel (FIG. 12A). [As discussed below, the HSA Signal Peptide also drives correct expression and cleavage of the PR402 fusion (SEQ ID NO:28; cDNA SEQ ID NO:68) because the identity of the latter is 99.5% identical to the expected, cleaved PR402 sequence, as determined by LC/MS (FIG. 19A). Hence, the native HSA Signal Peptide is a preferred leader sequence for all PTEN proteins disclosed herein].

[0410] The Applicant had previously found soluble PTEN-M is expressed in higher amounts in bacteria (unpublished results). This is consistent with the results of Tzani et al, 2016: PMID: 27249819, who showed PTEN-M may be expressed in higher amounts than PTEN-L in mammalian cells. However, the very opposite was the case when PTEN-M was fused downstream of the HSA Signal Peptide. FIG. 12B shows that, unexpectedly, the PTEN-M-HSA fusion PR416 (SEQ ID NO:120; cDNA SEQ ID NO:148) fails to be secreted at all even though it only lacks 6 aminoacids at the N-terminus, whereas PR402 (SEQ ID NO:28; cDNA SEQ ID NO:68) and PR415 (SEQ ID NO:119; cDNA SEQ ID NO:147) are made in comparable amounts. (It is noted that both PR415 (SEQ ID NO:119; cDNA SEQ ID NO:147) and PR416 (SEQ ID NO:120; cDNA SEQ ID NO:148) harbor a mutated scavenger HSA Cys34Ser; however this has no appreciable impact on PR415 expression according to FIG. 12B). Thus, the HSA Signal Peptide (SEQ ID NO:93) requires the wild-type N-terminus of PTEN-L (consisting of the wild-type 6 aa sequence SESPVT (SEQ ID NO: 245); see SEQ ID NO:3) to allow for PR402 to be effectively secreted, and it does not mediate secretion from a PTEN-M terminus (PR416 background), which lacks this 6 aa stretch. Paradoxically once again, however, inclusion of an acidic epitope tag (HA tag) upstream of PTEN-L's initiating Ser, still allows for effective synergy with the native HSA signal peptide, leading to effective (and, if anything, somewhat increased) secretion of the resulting variant PR409 (SEQ ID NO:118; cDNA SEQ ID NO:146) (FIG. 12C; lanes 1-2). Still, the difference of expression between PR409 (SEQ ID NO:118; cDNA SEQ ID NO:146) and PR402 (SEQ ID NO:28; cDNA SEQ ID NO:68) is not dramatic, suggesting that the potential of further engineering the unique 6 aa stretch of the PTEN-L N-terminus to increase expression in the PR402 background should be balanced against the possibility this engineering would introduce immunogenic determinants on a naturally occurring protein like PTEN-L.

[0411] In another embodiment, the minimal albumin domain that could be placed at the C′ of PTEN-L and still mediate efficient secretion of the resulting (PR402-like) fusion was determined. Deletion of the HSA's FcRn binding domain dIII at the HSA C′ prime reduced the overall secretion of the resulting fusion, PR413 (SEQ ID NO:121; cDNA SEQ ID NO:149), to about 30-40% of control PR402 levels (FIG. 12C, lane 3 vs. 1 and 5), whereas further deletion of domains II and III resulted in an undetectable fusion (PR414; SEQ ID NO:122; cDNA SEQ ID NO:150) (FIG. 12C, lane 4 vs. 1, 3 and 5). In contrast, progressive deletion from the N′ of HSA and up to aa 63 thereof had no effect, as the resulting fusions (PR417; SEQ ID NO:123; cDNA SEQ ID NO:151), which lacks the first 34aa of HSA and PR418 (SEQ ID NO:124; cDNA SEQ ID NO:152), which lacks the first 62 aa of has appeared indistinguishable vs. PR402 (FIG. 12D). Thus, aa(63-385) or more preferably aa(63-585) of HSA (SEQ ID NO:163) is the minimal albumin domain that is sufficient to stabilize PTEN-L in the N′-PTEN-L-albumin-C′(PR402-like) orientation.

[0412] In a follow up experiment, inversion of the relative orientation of the PTEN-S and albumin domains of PR61 resulted in a fusion protein (PR65, SEQ ID NO:125; cDNA SEQ ID NO:153) that was essentially not secretable by CHO-3E7 cells, as it could only be detected in trace amounts by overexposing the WB (FIG. 13), whereas a control fusion, wherein the MUD (SEQ ID NO:9) was sandwiched between two PTEN-S moieties and a glycine linker (PR911, SEQ ID NO:37; cDNA SEQ ID NO:77) was not expressed at all (results not shown). In contrast, PR61 (SEQ ID NO:19; cDNA SEQ ID NO:59) was once again secreted at very high levels in the CHO supernatants, as did analogous PR61 fusions whereby HSA had been replaced with either RSA (PR66; SEQ ID NO:126; cDNA SEQ ID NO:154), or with wild-type MSA (PR68; SEQ ID NO:128; cDNA SEQ ID NO:156) (FIG. 13). Remarkably, PR67 (SEQ ID NO:127; cDNA SEQ ID NO:155), an RSA domain III deletion mutant that presumably lacks binding to rat FcRn (Sand et al, 2015: PMID: 25674083) was expressed in comparable levels to PR61 (FIG. 13), as opposed to PR413 (SEQ ID NO:121; cDNA SEQ ID NO:149), which is only made to about 30% of PR402 levels (FIG. 12C). Thus, albumin dIII, or in general the minimal albumin domain (SEQ ID NO:163) is more important for the stabilization of PTEN-L-like (e.g. PR402; SEQ ID NO:28; cDNA SEQ ID NO:68) rather than PTEN-S-like (e.g. PR61; SEQ ID NO:19; cDNA SEQ ID NO:59) fusions. Still, it is to be noted here that the molecular mechanism whereby fusion to HSA leads to higher PTEN-L (e.g. PR402; SEQ ID NO:28; cDNA SEQ ID NO:68) and PTEN-S (e.g. PR61; SEQ ID NO:19; cDNA SEQ ID NO:59) expression and secretion is unknown. While potential intra-molecular interaction of PTEN-L/PTEN-S with HSA is possible in either the PR402 or the PR61 orientation, previously HSA was shown to be unable to bind PTEN-S in co-localization, co-immunoprecipitation, and molecular docking experiments, even though α-fetoprotein, a structurally related, albumin-like oncoprotein, could interact with PTEN-S under the same conditions (Zhu et al, 2015; PMID: 26078940).

[0413] In summary, the wild-type PTEN-L tumor suppressor cannot be meaningfully expressed in any of the major known industrial expression systems (E. coli, C. glutamicum, yeast, CHO/293 cells). Furthermore, fusion of PTEN-L to thioredoxin does not lead to appreciable secretion either. Likewise, fusion of PTEN-L to the Fc antibody portion in either orientation is also futile. Similarly, fusion of PTEN-L at the C′-prime of HSA (e.g. in PR3) also results in extensive degradation of the resulting fusion protein, which defeats any manufacturing purpose. In contrast, and quite surprisingly, PR402 (SEQ ID NO:28; cDNA SEQ ID NO:68) consisting of PTEN-L followed by mature HSA leads to industrially acceptable levels of the protein, that could be potentially improved upon further optimization (for example at the level of signal peptide selection and primarily by prevention of degradation through down-regulation of furin protease or by using perfusion of the cell culture), whereas, unexpectedly, PR416 (SEQ ID NO:120; cDNA SEQ ID NO:148), a PR402 variant consisting of wild-type PTEN-M followed by mature HSA was not expressed at all. Furthermore, in stark contrast to PR402 (SEQ ID NO:28; cDNA SEQ ID NO:68) and its variants (PR4, PR401), the homologous construction PR65 (SEQ ID NO:125; cDNA SEQ ID NO:153), whereby PTEN-S is followed by albumin, is essentially not secreted by CHO-3E7 cells, which is the exact opposite of what one would have expected based on the Applicant's results with PR3 (SEQ ID NO:16; cDNA SEQ ID NO:56) and PR402 (SEQ ID NO:28; cDNA SEQ ID NO:68). In contrast, PR61 (SEQ ID NO:19; cDNA SEQ ID NO:59) and PR6 (SEQ ID NO:18; cDNA SEQ ID NO:58), both inverse versions of PR65, totally paradoxically and quite dramatically, are secreted in very large amounts and are substantially degradation-resistant. Thus, following extensive mutagenesis, the Applicant has demonstrated that albumin unexpectedly solubilizes both PTEN-L and PTEN-S but only if placed in the opposite orientation each time (FIG. 6A). Further biophysical &crystallographic studies would be required to help understand the molecular basis of this remarkable dichotomy of the PTEN-L/PTEN-S-HSA fusions. Nevertheless, The Applicant's results could not have been possibly predicted by any skilled person in the art.

### Example 2. Generation of Cleavable PTEN-L& PTEN-S Human Serum Albumin Fusions

[0414] Hopkins et al, 2013 (PMID: 23744781) reported that while treating mice bearing subcutaneous human cancer xenografts with exogenous PTEN-L, PTEN-L was found not only in tumor cells of the cancer, but also in cells of the normal mouse tissues, such as lung and brain (as estimated by the reduction of pi3K pathway pharmacodynamic biomarker phosphorylation). This suggests that PTEN-L cannot discriminate between cancer and normal cells in vivo. However, cancer cell selectivity of the tumor suppressor is likely to be influenced by the state of the extracellular matrix (ECM), which is completely aberrant in cancer tissue. This is because cancer cells secrete a variety of intracellular proteases in the extracellular space so as to promote their aberrant growth. For example, furin, several members of the Matrix Metalloprotease superfamily such as the gelatinase MMP2/9, as well several members of the Cathepsin family of endolysosomal proteases, such as Cathepsin B (CATSB), are highly enriched for in the cancer tissue as opposed to normal tissues (Braun & Sauter, 2019: PMID: 31406574; Jablońska-Trypuć et al, 2016: PMID: 27028474; Vidak et al, 2019: PMID: 30897858); in some cases, protease enrichment may actually stem from loss of PTEN itself in cancer cells during cancer progression (e.g. Li Y et al, 2018: PMID: 29704427).

[0415] The Applicant initially constructed three PRs harboring a consensus MMP2/9 cleavage site (SEQ ID NO:165), namely PR2 (SEQ ID NO:15; cDNA SEQ ID NO:55), PR4 (SEQ ID NO:26; cDNA SEQ ID NO:66) and PR5 (SEQ ID NO:17; cDNA SEQ ID NO:57). However, PR2 (SEQ ID NO:15; cDNA SEQ ID NO:55) was shown to be non-manufacturable, and thus its sensitivity to MMP2/9 digestion could not be addressed; whereas PR4 (SEQ ID NO:26; cDNA SEQ ID NO:66) and PR5 (SEQ ID NO:17; cDNA SEQ ID NO:57) also contain a furin-sensitive linker such as the MCPD (SEQ ID NO:39) or SEQ ID NO:164, which, as shown above is sufficient to cause their complete degradation as well. Hence, to assess the MMP2/9 cleavability of SEQ ID NO:165 in a manufacturable context, the Applicant constructed PR405 (SEQ ID NO:129; cDNA SEQ ID NO:157). PR405 is in all other aspects identical with PR402, except PR405 also contains the SEQ ID NO:165 linker fused in frame between PTEN-L and HSA. FIG. 14 demonstrates that PR405 (SEQ ID NO:129; cDNA SEQ ID NO:157) is manufacturable and, like PR402 appears to be insensitive to furin-mediated degradation. In stark contrast, PR401 [which is identical to PR405 except it contains a linker sequence with a furin consensus site (SEQ ID NO:164 vs SEQ ID NO:165, respectively)] is degraded completely. Thus, the type and sequence of linker inserted between the two moieties of PR402 has a dramatic effect on degradation propensity and hence manufacturability of the resulting fusions, whereas PR402 (SEQ ID NO:28; cDNA SEQ ID NO:68) and PR405 (SEQ ID NO:129; cDNA SEQ ID NO:157) are equivalent from a manufacturing perspective, being both manufacturable.

[0416] Along the same lines, and in another embodiment, the Applicant inserted Cathepsin B-sensitive linkers (SEQ ID NO:106-108) in frame between the PTEN-L and HSA domains of PR402 (SEQ ID NO:28; cDNA SEQ ID NO:68), so as to generate PR406 (SEQ ID NO:130; cDNA SEQ ID NO:158), PR407 (SEQ ID NO:131; cDNA SEQ ID NO:159) and PR408 (SEQ ID NO:132; cDNA SEQ ID NO:160), respectively. Like PR402 (SEQ ID NO:28; cDNA SEQ ID NO:68) and PR405 (SEQ ID NO:129; cDNA SEQ ID NO:157), PR406 (SEQ ID NO:130; cDNA SEQ ID NO:158), PR407 (SEQ ID NO:131; cDNA SEQ ID NO:159) and PR408 (SEQ ID NO:132; cDNA SEQ ID NO:160) were all found to be manufacturable as no significant degradation could be noted (results not shown and FIG. 15). Subsequently, these 5 proteins were subjected to in vitro cleavage assays using purified recombinant MMP2 and CATSB.

[0417] Materials & Methods

[0418] pTT5-based PR402 (SEQ ID NO:28; cDNA SEQ ID NO:68), PR405 (SEQ ID NO:129; cDNA SEQ ID NO:157), PR406 (SEQ ID NO:130; cDNA SEQ ID NO:158), PR407 (SEQ ID NO:131; cDNA SEQ ID NO:159) and PR408 (SEQ ID NO:132; cDNA SEQ ID NO:160) expression vectors were transiently transfected in CHO-3E7 cells as described in Example 1. 90 μl of crude culture supernatant obtained at 5 days post-transfection was then mixed with 10 μl of either 10×MMP2 digestion buffer (500 mM Tris-HCl pH 7.3, 1 M NaCl, 100 mM CaCl₂)) or 10×CATSB pH 5.0 buffer [200 mM sodium citrate pH 5.0, 1.5 M NaCl, 50 mM DTT (added fresh before digestion)] or 10×CATSB pH 7.0 buffer (200 mM HEPES pH 7.0, 50 mM DTT (added fresh before digestion)]. The final pH was confirmed with pH paper on each 1× buffered solution. 20 nM (final) recombinant active MMP2 protease (Enzo cat. #BML-SE237-0010; provided at 1.2 mg/ml or 30 μM), or 0.3 μg/ml (final) active CATSB (BioVision #7580-5; provided at 0.5 mg/ml) were then added to each reaction. Immediately thereafter (t=0) or after 4 h or 21 h, 24 μl of each digestion reaction was brought into a separate tube containing 8 μl sample buffer with DTT. Samples were then heated for 10 min at 70° C. and loaded on SDS-PAGE. The gel was blotted with F-1 (anti-PTEN) antibody and an HRP-conjugated secondary antibody, as described previously.

[0419] Results

[0420] FIG. 15 shows that the expression of PR406 (SEQ ID NO:130; cDNA SEQ ID NO:158), PR407 (SEQ ID NO:131; cDNA SEQ ID NO:159) and PR408 (SEQ ID NO:132; cDNA SEQ ID NO:160) was comparable to that of PR402 (SEQ ID NO:28; cDNA SEQ ID NO:68) in the crude CHO-3E7 supernatants. PR402 was not appreciably cleaved by either recombinant MMP2 or CATSB. MMP2 did however cleave its consensus site (SEQ ID NO:165) on PR405 only; this cleavage released a PTEN-L-like fragment (˜70 KDa) that was identified using the anti-PTEN antibody (FIG. 15, star). PR405 (SEQ ID NO:129; cDNA SEQ ID NO:157) was not cleaved by CATSB, demonstrating that SEQ ID NO:165 is specific for the MMP2. In contrast, CATSB cleaved PR407 (SEQ ID NO:131; cDNA SEQ ID NO:159) and PR408 (SEQ ID NO:132; cDNA SEQ ID NO:160) to release a PTEN-L-like fragment at similar amounts (about 20% of total), though it did not cleave PR406 (SEQ ID NO:130; cDNA SEQ ID NO:158). Thus, CATSB is highly specific for PTEN-L-HSA fusions containing preferably the linker with SEQ ID NO:108 or even more preferably the minimal linker with SEQ ID NO:107, wherein the said CATSB linkers are inserted in frame between the C′ of PTEN-L and the N′ of HSA. Remarkably, CATSB only cleaves PR407 and PR408 at a low pH (FIG. 15), such as the acidic pH known to occur at the peri-cancerous tissues. This is a particularly relevant embodiment of the present invention because a circulating PTEN-L-(CATSB linker)-albumin fusion dosed intravenously to a subject in need thereof would be cleaved by extracellular CATSB at the acidic pH found at the cancer cites, thereby releasing active PTEN-L, which would penetrate cancer cells via its Minimal Cell Penetration Domain (SEQ ID NO:39) and kill them. In another embodiment, a circulating PTEN-L-(MMP2 linker)-albumin fusion dosed intravenously to a subject in need thereof would be cleaved by extracellular MMP2 found in large amounts at the cancer cites, thereby releasing active PTEN-L, which would penetrate cancer cells via its Minimal Cell Penetration Domain (SEQ ID NO:39) and kill them.

[0421] A PTEN-L-(MMP2/9-cleavable linker)-albumin fusion or a PTEN-L-(CATSB-cleavable linker)-albumin fusion is dosed intravenously to a subject, for example, a rodent bearing a human tumor xenograft. In this rodent aminal model, a human tumor cell line is engineered to express a bioluminescent gene, such as Luciferase. One suitable engineered tumor cell line is the PTEN-albumin fusion 4T1-Luc-responsive mouse breast cancer cell line. Co-administered with the tumor cells is an activatable fluorescence imaging agent, including but not limited to the MMPSense 645 FAST (MMP2/9) and Cat B680 FAST (CATSB) protease sensitive imaging agents (FAST platform, PerkinElmer, Waltham, MA), respectively. Release of active PTEN-L due to protease action on the fusion at the peri-tumor area is simultaneously detected, quantified and/or correlated with imaging contributed by the protease-sensitive probe acting at the very same cancer site and at the same time. Meanwhile, imaging agent fluorescence intensity further correlates with the loss of Luciferase signaling within the very same tumor site and at the same time, following the release, biodistribution and penetration of active PTEN-L into the tumor cell, as a result of treatment of the subject with the albumin-PTEN fusion, thereby altogether correlating (pre)clinical efficacy response of the subject to the fusion with a tumor imaging biomarker of the cancer in the subject. In yet another experiment, the intact albumin-PTEN-L or albumin-PTEN-S fusion is taken up by cancer cells via cell penetration mediated by the albumin-FcRn receptor system (acting in concert or synergistically with the LUD-mediated penetration in the case of PTEN-L). The internalized albumin-PTEN fusion protein is also digested intracellularly following cleavage by endosomal or lysosomal CATSB, thereby releasing active PTEN protein in the interior of the cancer cell, leading to its death.

[0422] In another experiment, the intact albumin-PTEN-L or albumin-PTEN-S fusion isco-administered with the MMPSense 645 FAST (MMP2/9) and Cat B680 FAST (CATSB) protease sensitive imaging agents. The internalized albumin-PTEN fusion protein is taken up by cancer cells via cell penetration mediated by the albumin-FcRn receptor system, while the internalized albumin-PTEN fusion protein is digested intracellularly following cleavage by endosomal or lysosomal CATSB, thereby releasing active PTEN protein in the interior of the cancer cell, leading to its death. Thus, the biodistribution of the fusion, penetration of active PTEN into the tumor cell, (pre)clinical efficacy response of the subject to the fusion drug are directly and measurably correlated with a peri-cancer area-specific imaging biomarker of the tumor in the subject. Also tested is an albumin-PTEN fusion protein containing linkers comprising suitable cleavage sites of cancer related proteases selected from ADAMS, ADAMS, ADAM10, ADAM12, ADAM15, ADAM17/TACE, ADAMDEC1, ADAMTS1, ADAMTS4, ADAMTS5, Aspartate proteases, e.g., BACE, Renin, Aspartic cathepsins, e.g., Cathepsin D, Cathepsin E, Caspases, e.g., Caspase 1, Caspase 2, Caspase 3, Caspase 4, Caspase 5, Caspase 6, Caspase 7, Caspase 8, Caspase 9, Caspase 10, Caspase 14, Cysteine cathepsins, e.g., Cathepsin B, Cathepsin C, Cathepsin K, Cathepsin L, Cathepsin S, Cathepsin V/L2, Cathepsin X/Z/P, Cysteine proteinases, e.g., Cruzipain, Legumain, Otubain-2, KLKs, e.g., KLK4, KLK5, KLK6, KLK7, KLK8, KLK10, KLK11, KLK13, KLK14, Metallo proteinases, e.g., Meprin, Neprilysin, PSMA, BMP-1, MMPs, e.g., MMP1, MMP3, MMP7, MMP8, MMP10, MMP11, MMP12, MMP13, MMP14, MMP15, MMP16, MMP17, MMP19, MMP20, MMP23, MMP24, MMP26, MMP27, Serine proteases, e.g., activated protein C, Cathepsin A, Cathepsin G, Chymase, coagulation factor proteases, (e.g., FVIIa, FIXa, FXa, FXIa, FXIIa), Elastase, Granzyme B, Guanidinobenzoatase, HtrA1, Human Neutrophil Elastase, Lactoferrin, Marapsin, NS3/4A, PACE4, Plasmin, PSA, tPA, Thrombin, Tryptase, uPA, Type II Transmembrane, Serine Proteases (TTSPs), e.g., DESC1, DPP-4, FAP, Hepsin, Matriptase-2, MT-SP1/Matriptase, TMPRSS2, TMPRSS3, TMPRSS4. In one experiment, intracellular digestion of the PTEN-albumin fusions is mediated by a protease like furin.

### Example 3. Manufacturing & Purification Scouting of PTEN Human Serum Albumin Fusions

[0423] 1LT of CHO-3E7 cells growing in animal origin-free, protein-free, and chemically defined were transiently transfected with pTT5-PR402 (SEQ ID NO:28; cDNA SEQ ID NO:68) and grown at 32° C. in suspension, exactly as described in Durocher & Loignon, 2009 (patents.google.com/patent/U.S. Pat. No. 8,637,315). Cells and media were collected 4 days post-transfection. Viability upon collection was 75.5% as assayed by Accumax (Innovative Cell Technologies, Inc.). The supernatant was loaded directly on a 2 ml nickel-sepharose column. The flowthrough of the column (950 ml) was collected and the column was washed first with 12 ml of (300 mM NaCl, 50 mM NaPO₄ pH 7.0) and then with 12 ml of (300 mM NaCl, 10 mM imidazole, 50 mM NaPO₄ pH 7.0) buffer. PR402 was eluted in fractions of 0.5 ml with (300 mM imidazole, 300 mM NaCl, 50 mM NaPO₄ pH 7.0. Best fractions (#4 to 15) containing the protein (as determined by Nanovue) were pooled and desalted in THE buffer (50 mM Tris, 150 mM NaCl, 1 mM EDTA pH 7.4), filter sterilized, quantified by Nanodrop, aliquoted and frozen at −80° C. As shown in FIG. 16, a portion of PR402 (130 KDa) escaped in the flow through (SDS-PAGE, lanes 1-2), whereas some impurities and degradation products were also apparent in the final, semi-purified preparation (lanes 5 and 6; samples were run in reducing and non-reducing SDS-PAGE, respectively). Thus, PTEN albumin fusions tagged with 6xHis (SEQ ID NO: 243) can be purified with IMAC to about 50% purity.

[0424] In another embodiment, pTT5-PR405 (SEQ ID NO:129; cDNA SEQ ID NO:157) was transiently transfected in 40 ml HEK293 cells grown in suspension for 5 days. The supernatant was then diluted with 4 volumes (160 ml) of buffer A (20 mM sodium phosphate; 150 mM NaCl, 2 mM DTT pH 5.8) and then loaded on 1 ml Cibacron Blue Sepharose (GE HiTrap™ Blue HP) column. The column was washed with 8 ml buffer A and bound proteins were eluted in 2 steps: first by adding 8 ml of buffer B (20 mM sodium phosphate; 2 mM DTT, 1M NaCl pH 5.8), whereby 7 fractions of 4 ml each were collected; and then by adding 8 ml of buffer C (20 mM sodium phosphate; 2 mM DTT, 2M NaCl pH 5.8), whereby 6 fractions of −5 ml each were collected. Aliquots of each fraction were loaded on SDS-PAGE and the gel was blotted with anti-6xHis antibody (SEQ ID NO: 243).

[0425] As seen in FIG. 17A, PR405 bound Cibacron Blue quantitatively (lanes 1 and 2). PR405 could then be eluted from the column above 1M NaCl and up to 2M NaCl (lanes 3-13). As expected from the fact that the Cibacron Blue dye has high affinity for albumin, albumin degradants of 60-65 KDa (similar to the size of mature HSA, consistent with degradation of the PR405 fusion to its two major domains) can also bind and elute from the column (FIG. 17A, crosses). However, the albumin degradants can be subsequently removed by heparin-affinity chromatography, as follows.

[0426] Fractions 6-13 of the Cibacron Blue column eluate were pooled and dialyzed overnight into buffer D (20 mM sodium phosphate; 0.15 M NaCl, 2 mM DTT, pH 6.1). The dialyzed solution was then loaded onto 1 ml Heparin-Sepharose 6 Fast Flow resin (General Electric) equilibrated in buffer D. The column was washed with 8 column volumes (CV) of buffer D, and then eluted with 2 steps of NaCl; first by applying 5 CV of buffer E (20 mM Na phosphate; 1.0 M NaCl, 2 mM DTT, pH 6.1) and then by applying 5 CV of buffer F (20 mM sodium phosphate; 2.0 M NaCl, 2 mM DTT, pH 6.1). Aliquots of each fraction were loaded on SDS-PAGE and the gel was blotted with anti-6xHis antibody (SEQ ID NO: 243). As seen in FIG. 17B, the great majority of the albumin degradants are excluded from the heparin (lanes 3-5), from which PR405 can now be eluted in substantially enriched form at about 1M NaCl (FIG. 17B, lanes 6-11 and FIG. 17C).

[0427] Given the high salinity required to elute PR405 from both columns, is anticipated that addition of NaCl concentration up to 0.75M (or use of a stronger salt than NaCl per the Hofmeister series) in the wash buffer would facilitate more efficient removal of host cellular proteins (FIG. 17A, lanes 3-14), leading to a better enrichment of the PTEN protein fusion to be purified.

[0428] In another embodiment, a rather aged (8-month old batch kept at −20° C.), IMAC-purified sample of PR402 (see above) was dialyzed into (20 mM sodium phosphate pH 5.8, 2.2M NaCl) buffer and then absorbed onto a 5 ml HiTrap™ Phenyl (Low Sub FF) Hydrophobic Interaction Chromatography (General Electric) prequilibrated in the same buffer. The column was washed twice in binding buffer and bound proteins were eluted with 5CV of (20 mM sodium phosphate pH 5.8). Aliquots of starting material, flow through, wash and eluate were loaded on SDS-PAGE; the gel was blotted with anti-His. As shown in FIG. 18, PR402 can quantitatively bind the column, from which it can be eluted upon reduction of the ionic strength.

[0429] In one embodiment, the albumin PTEN fusion protein to be purified is captured by Cibacron Blue Affinity Chromatography, eluted in high salt, dialyzed and bound to Heparin Affinity Chromatography.

[0430] In another embodiment, the PTEN fusion protein is captured by Albupure Affinity Chromatography (ProMetic BioSciences Ltd, UK), according to the published instructions of the manufacturer, wherein Albupure Affinity Chromatography has been developed for highly enriching purification of albumin fusions like the PTEN fusion proteins claimed herein.

[0431] In another embodiment, the PTEN fusion protein is purified orthogonally by employing a sequence of columns consisting of: capture of the fusion protein by Heparin Affinity Chromatography, such that the albumin degradants are removed in the column flowthrough, elution of the fusion protein in high salt (around 0.75M NaCl); direct absorption of the eluate onto Cibacron Blue Affinity Chromatography, elution of the fusion from Cibacron Blue in about 2M NaCl; followed by direct absorption of the eluate onto Phenyl Sepharose Hydrophobic Interaction Chromatography, from which the PTEN fusion protein can be eluted in low/physiological salt and brought into a pharmaceutically acceptable buffer.

[0432] Even though an aged preparation of PR402 contained aggregates, the freshly manufactured batch of PR402 of FIG. 16 migrates as a monomer of 120-130 KDa on both reducing and non-reducing gel electrophoresis, whereby the high MW bands seen on SDS-PAGE appear to be contaminants instead of aggregates since these bands are not visualized by anti-PTEN WB (FIG. 16). This suggests that the native state of the albumin-PTEN fusions is monomeric.

[0433] The main band of 130 KDa was excised from the gel of FIG. 16, solubilized, digested with trypsin or chymotrypsin and sequenced by LC/MS, according to standard procedures in the art (FIG. 19). The results showed a perfect (99.6%) match with the expected sequence (SEQ ID NO:28). Quite importantly, the N-terminal peptide [SESP (SEQ ID NO: 246) . . . PPTR (SEQ ID NO: 247)] (see FIG. 19A) was identified, which confirms the desired sequence N-terminus of the mature PR402 (SEQ ID NO:28; cDNA SEQ ID NO:68), thereby demonstrating the HSA Signal Peptide (SEQ ID NO:93) can mediate correct translocation of the fusion protein through the ER and TGN, followed by its cleavage and secretion of mature PR402 (SEQ ID NO:28; cDNA SEQ ID NO:68) in the supernatant of CHO cells.

[0434] Several methionine residues of PR402 were found to be oxidized, as assayed by LC/MS, which may contribute to the 10 KDa difference in migration between the reduced and the non-reduced form (FIG. 16, lanes 5-6). In addition, several Asn residues were found to be deamidated, which is consistent with the predicted behavior of this residue in the mildly alkaline buffer (TNE pH 7.4) used to purify PR402 (FIG. 16).

[0435] Because PTEN-L cannot be systematically manufactured in bacteria in an industrially relevant form, and since it is known that N- and O-linked glycosylations found in higher species may stabilize (bacterially expressed) proteins both from physicochemical as well pharmacokinetic/renal clearance perspective, the Applicant also determined PR402's sugar modifications with an emphasis on the LUD (SEQ ID NO:5). As was previously bioinformatically predicted (Malaney et al, 2013: PMID: 24056727), the LUD of PR402 was found to be heavily O-glycosylated. However, the actual O-sugar bearing residues were substantially different than those predicted by Malaney et al. Specifically, the PR402 LUD (SEQ ID NO:5) was found to contain several mucin-like O-linked glycans, such as Tn, Tf, sialyl-T and di-sialyl T structures (for review of these glycan modifications see Kudelka et al, 2015; PMID: 25727146) on 9 LUD residues, as follows (numbering after SEQ ID NO:1): S65, S85, S115, S117, S129, T140, S161, S164 and S168 (FIG. 19B).

[0436] To ensure that these O-glycans are indeed representative of the LUD, the Applicant constructed F137 (SEQ ID NO:133; cDNA SEQ ID NO:161), which expresses the p53 tumor suppressor instead of PTEN-S, wherein the p53 domain of F137 is placed in exactly in the same position and orientation within the PR402 backbone. F137 was purified by IMAC as shown in FIG. 16 (results not shown). The monomeric F137 fusion protein was extracted from the gel and sequenced with LC/MS, as above. It was found that the F137 LUD bears similar O-glycan modifications on the same residues of the LUD, except for S135 (FIG. 19B). In addition, the F137 LUD had 4 additional O-sugar sites (FIG. 19B), which are not present on the PR402 LUD. Thus, the human LUD appears to be naturally O-glycosylated on several residues mainly including but not limited to S65, S85, S115, S117, S129, T140, S161, S164 and S168. In contrast, expression of the PTEN-L fusion in insect cells (FIG. 5) results in a completely aberrant and significantly poorer O-glycan profile (FIG. 19B). As such, even if an insect PTEN-L fusion were manufacturable, it would cause significant immunogenicity upon injection in a subject.

[0437] In another aspect, the presence of highly sulfated O-glycan antennas on the PR402 LUD would be anticipated to introduce several negative charges locally, which would practically lower the effective p1 of the wild-type LUD (predicted to be at 11.55) substantially, toward the p1 of PTEN-S, which is 5.94. In such an embodiment, simultaneous mutation of S65, S85, S115, S117, S129, T140, S161, S164 and S168 to aspartate or glutamate would lead to a mutated human LUD (SEQ ID NO:134) having a stand-alone p1 of 9.29 and, which, when fused to PTEN-S(SEQ ID NO:2) would lead to “sialylated-like” PTEN-L with a calculated p1 of 6.33.

[0438] In another embodiment, mutation of S65, S85, S115, S117, S129, T140, S161, S164 and 5168 to aspartate or glutamate can be engineered in a bacterial expression vector to render the resulting bacterially expressed protein human-like and substantially more stable physicochemically.

[0439] In other embodiments, one, two or more or all of O-glycan bearing LUD residues may be mutated to aspartate or glutamate, thereby lowering the p1 of the resulting human protein to improve its pharmacokinetic properties, wherein the said residues to be mutated are selected from S65, S85, S115, S117, S129, T140, S161, S164 and S168 of SEQ ID NO:1.

[0440] In another aspect, the Applicant determined potential glycosylation sites on the PTEN-S moeity of PR402. As shown in FIG. 19C, like the LUD, PTEN-S expressed in CHO-3E7 cells in the PR402 background is also O-glycosylated, though to a much lower extent than the LUD. The PTEN-S tail (aa 350-403; PTEN-S numbering; SEQ ID NO:2) bears most O-linked sites, in line with the tail's regulatory activity. In addition, N292 (PTEN-S numbering) is decorated with 4 similar N-glycans; such N-linked structures are occasionally found on proteins expressed in CHO cells. Despite the vast literature on PTEN-S, however, there is no report on the potential involvement or relevance of PTEN-S's N292 in protein stability or cancer, suggesting that this residue could be potentially mutated to alleviate O-glycan heterogeneity if needed, thereby potentially facilitating analytical process development of PR402-like or PR61-like fusions.

### Example 4. The PTEN Albumin Fusion Proteins are Functional Cell Penetrating Tumor Suppressors

[0441] The Applicant then determined whether the PTEN albumin fusions disclosed herein possess tumor suppressor function.

[0442] In one embodiment, a very poor by industrial standards (i.e, very crude, dilute and debris-containing) supernatant from either PR5 (SEQ ID NO:17; cDNA SEQ ID NO:57), or mock-transfected HEK293 cells (see FIG. 8B) was placed directly onto the surface of KTOSA, a PTEN null cancer cell line (FIG. 20A, upper panel, left) or REM134, a PTEN-S-null cancer cell line that apparently still expresses PTEN-L, for 4 h. Cells were then washed, lysed and cell extracts blotted with the indicated antibodies (FIG. 20A). It was found that a PTEN-M-like, 70 KDa protein contained in the PR5 supernatants (see FIG. 8B) entered both cell lines (FIG. 20A; upper panel, middle set). This PR5-generated PTEN-M appeared to be of full length because it migrated at the expected MW (˜70 KDa), just below the endogenous REM134 PTEN-L protein. REM134 cell extracts contained two additional bands at around 65 KDa, which are likely degradation products of exogenous PTEN-M, since no equivalent bands exist in the KTOSA lysate. Importantly, the PR5-released, cell penetration-competent PTEN-M mediated detectable downregulation of pS6K phosphorylation in REM134 cells[pS6K is a known pharmacodynamic (PD) target of exogenously applied PTEN-L protein drug; Hopkins et al, 2013: PMID: 23744781]. This PD effect of PTEN-M becomes even more prominent if one takes into account that PR5 supernatants used in this experiment contained essentially only HSA and little if any PTEN-M (FIG. 20A, lower panel). Thus, minute amounts of cell penetrating PTEN may exert a significant pharmacodynamic effect in cancer cells.

[0443] In one embodiment, the PTEN-albumin fusion that releases exogenous, cell-penetrating PTEN, such as PTEN-L and PTEN-M, leading to favorable regulation of the target cancer cell pharmacodynamics in a subject, is PR405 (SEQ ID NO:129; cDNA SEQ ID NO:157), wherein the said fusion circulates in the blood of the subject and is degraded into cell-penetrating PTEN by the action of a protease like MMP2/9, wherein such protease is abundant in the peri-cancerous tissue of the subject, but much less so in normal tissues of the subject.

[0444] In another embodiment, the PTEN-albumin fusion that releases exogenous, cell-penetrating PTEN, such as PTEN-L and PTEN-M, leading to favorable regulation of the target cancer cell pharmacodynamics in a subject, is PR407 (SEQ ID NO:131; cDNA SEQ ID NO:159), or PR408 (SEQ ID NO:132; cDNA SEQ ID NO:160), wherein the said fusion circulates in the blood of the subject and is degraded into cell-penetrating PTEN by the action of a protease like Cathepsin B, wherein such protease is abundant in the acidic, peri-cancerous tissue of the subject, but much less so in the mildly alkaline, physiological normal tissue of the subject.

[0445] In another embodiment, the subject protease that, when a PTEN-albumin fusion that is dosed into a subject, releases exogenous, cell-penetrating PTEN, from the fusion, such as PTEN-L and PTEN-M, leading to favorable regulation of the target cancer cell pharmacodynamics in the subject, is a protease selected from ADAMS, ADAMS, ADAM10, ADAM12, ADAM15, ADAM17/TACE, ADAMDEC1, ADAMTS1, ADAMTS4, ADAMTS5, Aspartate proteases, e.g., BACE, Renin, Aspartic cathepsins, e.g., Cathepsin D, Cathepsin E, Caspases, e.g., Caspase 1, Caspase 2, Caspase 3, Caspase 4, Caspase 5, Caspase 6, Caspase 7, Caspase 8, Caspase 9, Caspase 10, Caspase 14, Cysteine cathepsins, e.g., Cathepsin B, Cathepsin C, Cathepsin K, Cathepsin L, Cathepsin S, Cathepsin V/L2, Cathepsin X/Z/P, Cysteine proteinases, e.g., Cruzipain, Legumain, Otubain-2, KLKs, e.g., KLK4, KLK5, KLK6, KLK7, KLK8, KLK10, KLK11, KLK13, KLK14, Metallo proteinases, e.g., Meprin, Neprilysin, PSMA, BMP-1, MMPs, e.g., MMP1, MMP3, MMP7, MMP8, MMP10, MMP11, MMP12, MMP13, MMP14, MMP15, MMP16, MMP17, MMP19, MMP20, MMP23, MMP24, MMP26, MMP27, Serine proteases, e.g., activated protein C, Cathepsin A, Cathepsin G, Chymase, coagulation factor proteases, (e.g., FVIIa, FIXa, FXa, FXIa, FXIIa), Elastase, Granzyme B, Guanidinobenzoatase, HtrA1, Human Neutrophil Elastase, Lactoferrin, Marapsin, NS3/4A, PACE4, Plasmin, PSA, tPA, Thrombin, Tryptase, uPA, Type II Transmembrane, Serine Proteases (TTSPs), e.g., DESC1, DPP-4, FAP, Hepsin, Matriptase-2, MT-SP1/Matriptase, TMPRSS2, TMPRSS3 and TMPRSS4.

[0446] In another experiment, the intact albumin-PTEN-L or albumin-PTEN-S fusion isco-administered with the MMPSense 645 FAST (MMP2/9) and Cat B680 FAST (CATSB) protease sensitive imaging agents. The internalized albumin-PTEN fusion protein is taken up by cancer cells via cell penetration mediated by the albumin-FcRn receptor system, or PTEN-L's cell penetration domain, while the internalized albumin-PTEN fusion protein is digested intracellularly following cleavage by endosomal or lysosomal CATSB, thereby releasing active PTEN protein in the interior of the cancer cell, leading to its death. The biodistribution of the fusion, penetration of active PTEN into the tumor cell, (pre)clinical efficacy response of the subject to the fusion drug are directly and measurably correlated with a peri-cancer area-specific imaging biomarker of the tumor in the subject. In another experiment, to assess whether the observed PD effects elicited by the albumin PTEN fusions also correlate with measurable & tangible tumor suppressor effects, such as cancer cell death, the Applicant set up a cell-based assay in the PTEN null, PC3 human prostate cancer cell line. One way tumor suppressors kill cancer cells is by initiating apoptosis via cleavage of an inactive cytoplasmic pro-caspase 3 enzyme to release the smaller, apoptosis executing CASP3 enzyme, which then commits the cell to destruct itself via apoptosis. This property has been harnessed in various commercial cell-based assay kits, whereby activation of a Luciferase-tagged apoptotic CASP3 or CASP7 enzymes can be measured quantitatively in the cell lysate by means of a luminometer.

[0447] It was first confirmed that, as expected from Applicant's results, PR402 (SEQ ID NO:28; cDNA SEQ ID NO:68) indeed enters PC3 cells following treatment of the cells for 4 h or 24 h (FIG. 20B, lanes 1 vs. 4 and 7 vs. 10). Subsequently, the Caspase-Glo® 3/7 Assay System (Promega Corp, catalog #G8090) was optimized to measure PR402-mediated cancer cell death, as follows: 600 PC-3 cells growing in F12K medium supplemented with 10% FBS were plated in 96-well plates in the same medium overnight. On the next day, the medium was removed and substituted with 0.1 ml of (F12K+0.5% FBS; i.e., serum-free) medium. PR402 was then added to the cells at the appropriate concentration and for the desired time (typically 1-4 h). At the end of the incubation, the drug solution was removed, cells were washed twice in 0.2 ml of serum-free medium and then left sitting at room temperature. 0.1 ml of the Caspase 3/7 Glo reagent prepared according to the instructions of the manufacturer was then added to each well. Wells were shaken gently and further incubated at room temperature for 30 minutes to allow for cell lysis. The luminescence signal of each sample lysate was measured in triplicate using a plate reader. Blank values were subtracted from all measurements.

[0448] Using this protocol, the Applicant surprisingly found that when two distinct batches of PR402 (SEQ ID NO:28; cDNA SEQ ID NO:68) fusion (both manufactured according to Example 3) were put into contact with PC3 cells, they both resulted in robust CASP3/7 activation at similar levels (FIG. 20C). In fact, PR402 (SEQ ID NO:28; cDNA SEQ ID NO:68) appears to require just 1 h of contact with the cell monolayer to initiate apoptosis, whereby no major additional enhancement of cell death occurs upon longer incubations, i.e., up to 4 h (FIG. 20C). Consistent with its PC3 cell killing capability, exogenous PR402 (SEQ ID NO:28; cDNA SEQ ID NO:68) was found to also initiate cell death of other PTEN null cells such as SK-MEL-28 (melanoma; FIG. 20D), MSTO-211 (mesothelioma) and A2780 (ovarian carcinoma) (results not shown).

[0449] About 30-50% of all cancer patients are totally null for the PTEN tumor suppressors, regardless of indication, as assayed by the complete absence of PTEN immuno-histochemical reactivity (referred to as H score, wherein H<20) using pan-PTEN antibodies such as 138G6 and SP218 (Pulido et al, 2019; PMID: 31501265). For their part, patients contributing seemingly normal H scores, may still contain dysfunctional or inactivated or even cancer-promoting PTEN variants. The latter phenotypes are typically generated via point mutations on the PTEN proteins and are both very challenging to detect by antibody-based methods as well as potentially more difficult to treat than the PTEN null phenotypes (Leslie & Longy, 2016: PMID: 26827793). However, as shown in FIG. 20E, PR402 (SEQ ID NO:28; cDNA SEQ ID NO:68) initiates cell death also of cancer cell lines that have apparently normal endogenous PTEN, such as 4T1 mouse triple negative breast cancer (Zhao et al, 2013; PMID: 23951172) and ID-8 mouse ovarian carcinoma. Thus, the PTEN albumin fusions provided for herein can kill cancer cells regardless of the underlying status of the endogenous PTEN proteins of the subject.

[0450] In another aspect, the Applicant surprisingly found that when a PR61-containing CHO-3E7 supernatant was brought into contact with a PC3 cell monolayer for 2 h, a relatively high amount of PR61 (SEQ ID NO:19; cDNA SEQ ID NO:59) was able to enter cells, whereas the control, empty-vector (i.e., pTT5; SEQ ID NO:173) transfected CHO-3E7 supernatant provided no anti-6xHis immunoreactivity (SEQ ID NO: 243) (FIG. 20F, upper panel, lanes 2 vs. 4). What's more, PR61 (SEQ ID NO:19; cDNA SEQ ID NO:59) was able to initiate cell death, as measured by activation of CASP3/7 (FIG. 20F, lower panel). Because PTEN-S has no known cell-penetration capacity, the latter must be mediated by albumin. To test which albumin domain is responsible for cell entry of PR61-like fusions, PR67 (SEQ ID NO:127; cDNA SEQ ID NO:155) and PR68 (SEQ ID NO:128; cDNA SEQ ID NO:156) were semi-purified via IMAC and then brought onto contact with PC3 cells. As shown in FIG. 20G, and quite surprisingly, both fusions entered PC3 cells within 1 h of incubation. Thus, PR61-like and PR67-like HSA-PTEN-S fusions are able to enter cancer cells and kill them. Moreover, the Minimal Human Serum Albumin domain (SEQ ID NO:163) is sufficient to mediate the functional (anti-cancer) properties of PR61-like fusions including but not limited to PR67 (SEQ ID NO:127; cDNA SEQ ID NO:155) and PR68 (SEQ ID NO:128; cDNA SEQ ID NO:156).

[0451] Albumin dIII is apparently redundant with respect to both the stabilization and cell entry of PTEN-S fusions (such as PR67; FIG. 13& 20G). In contrast, dIII is required for maximal PR402 stabilization, whereas PR402 (SEQ ID NO:28; cDNA SEQ ID NO:68) is even more destabilized when dII is removed as well (FIG. 12C, PR413, PR414). Thus, albumin interacts with similar, yet also distinct ways with PTEN-Sand PTEN-L that a skilled person in the art could not have possibly predicted prior to conducting the experiment.

[0452] In yet another aspect, because the relative cytotoxic ability of albumin-PTEN-L fusions vs. the wild-type, unfused PTEN-L cannot be determined [(since the latter cannot be systematically made in soluble and pure form (see FIGS. 1-5 & 7)], the Applicant instead compared PR402 (SEQ ID NO:28; cDNA SEQ ID NO:68) with F137 (SEQ ID NO:133; cDNA SEQ ID NO:161) in the CASP3/7 assay. Such a comparison actually makes more sense, because both fusions contain albumin as a partner and in the same relative position. As shown in FIG. 20F, identical amounts of IMAC-purified PR402 appear to initiate similar levels of PC3 cell death. Taking into consideration the structural results of FIG. 19, it would appear that PR402 (SEQ ID NO:28; cDNA SEQ ID NO:68) with F137 (SEQ ID NO:133; cDNA SEQ ID NO:161) are functionally bioequivalent. Collectively, FIG. 20 demonstrates that the albumin-PTEN-L fusions disclosed herein rapidly deliver functional PTEN tumor suppressor in the interior of cancer cells, leading to favorable regulation of pharmacodynamic markers, but also to cancer cell death by apoptosis, the latter being the most important property of a functional tumor suppressor. Thus, the present invention has solved the problem of inability of the PTEN tumor suppressor protein to transduce the cancer cell membrane, by providing manufacturable cell-penetrating albumin-PTEN fusions with intact tumor suppressor function.

[0453] In other experiments, because it was originally shown that exogenous PTEN-L can induce CASP3/7 activation within a tumor nodule, leading to the reduction of the volume of the tumor nodule in an animal bearing a human cancer xenograft (Hopkins et al, 2013: PMID: 23744781), and given that the Applicant has determined that the albumin-PTEN fusions disclosed herein also activate CASP3/7 to mediate cancer cell death, experiments are performed to show that when administered as a once-daily intravenous monotherapy into mice with PC3 human prostate, 4T1-Luc mouse or MDAMB468 human triple negative breast cancer xenografts, the albumin-PTEN fusions also reduce the volume of the tumor nodules in the mice, in a dose-responsive way over the standard course of 5 weeks.

[0454] In some experiments, the manufacturable cell penetrating albumin-PTEN fusion that leads to cancer cell death that is associated with favorable regulation of pharmacodynamic markers in a subject is selected from PR402 (SEQ ID NO:28; cDNA SEQ ID NO:68), PR405 (SEQ ID NO:129; cDNA SEQ ID NO:157), PR407 (SEQ ID NO:131; cDNA SEQ ID NO:159), PR408 (SEQ ID NO:132; cDNA SEQ ID NO:160) or a deletion, point mutant, analog or variant of each thereof.

[0455] In other embodiments, the manufacturable cell penetrating albumin-PTEN fusion that leads to cancer cell death that is associated with favorable regulation of pharmacodynamic markers in a subject is selected from PR6 (SEQ ID NO:18; cDNA SEQ ID NO:58), PR61 (SEQ ID NO:19; cDNA SEQ ID NO:59), PR32 (SEQ ID NO:24; cDNA SEQ ID NO:64), PR33 (SEQ ID NO:25; cDNA SEQ ID NO:65), PR34 (SEQ ID NO:50; cDNA SEQ ID NO:136), PR66 (SEQ ID NO:126; cDNA SEQ ID NO:154), PR67 (SEQ ID NO:127; cDNA SEQ ID NO:155), PR68 (SEQ ID NO:128; cDNA SEQ ID NO:156) or a deletion, point mutant, analog or variant of each thereof.

[0456] In other embodiments, the manufacturable albumin-PTEN fusion that circulates in the blood of a subject, when injected into the subject, penetrates cancer cells in an intact form, leading to cancer cell death associated with favorable regulation of pharmacodynamic markers in the subject.

[0457] In other embodiments, the manufacturable albumin-PTEN fusion that circulates in the blood of a subject when injected into the subject, is degraded into a cell penetrating PTEN protein, following cleavage of the fusion by a cancer-associated protease, wherein the so released cell penetration-capable PTEN protein enters cancer cells, leading to their death associated with favorable regulation of pharmacodynamic markers in the subject.

[0458] In other experiments, the manufacturable albumin-PTEN fusion that circulates in the blood of a subject when injected into the subject, is degraded into a cell penetrating PTEN protein, following cleavage of the fusion by a cancer-associated protease. The so released cell penetration-capable PTEN protein enters cancer cells, leading to their death associated with quantitative measurement of tumor imaging markers in the subject. The pre(clinical) efficacy of the subject to the albumin-PTEN fusion is directly correlated with the imaging biomarker levels in the same cancer and at the same time.

### Example 6. Development Scouting of Analytical Methods to Measure PTEN-Albumin Fusion Drug PK Levels in Rodent, Simian and Human Plasma

[0459] Because PTEN-L and albumin exist in all mammals, rats and cynomolgous monkeys are relevant species for IND-enabling GLP toxicology of the PTEN albumin fusions. However, in view of the saturating amounts and high conservation of circulating albumin in mammalian plasma, antibody-based pharmacokinetic (“PK”) bioanalytical methods, such as sandwich ELISA, must be designed based on capturing plasma PTEN rather than albumin. Accordingly, assuming that total PTEN-L levels of subject plasma are relatively low, a PR402-like protein drug PK could be measured using an anti-LUD Ab (e.g. 3A4.1) and one of the four available C-terminal pan-PTEN Abs (FIG. 6B) for analyte capture and detection, respectively. Such an ELISA measures total intact PTEN-L tumor suppressor circulating in rat, simian and human plasma, following injection of a PR402-like protein in a subject. By extension, a 3A4.1/F-10 (valid for rat, simian, human PK) or a 3A4.1/AL-01 (valid for human PK only) sandwich ELISA measures total intact pro-drug PK levels in the PR402 (SEQ ID NO:28; cDNA SEQ ID NO:68), PR405 (SEQ ID NO:129; cDNA SEQ ID NO:157), PR406 (SEQ ID NO:130; cDNA SEQ ID NO:158), PR407 (SEQ ID NO:131; cDNA SEQ ID NO:159) and PR408 (SEQ ID NO:132; cDNA SEQ ID NO:160). setting, prior to release of mature PTEN-L from the fusion at the cancer site of the corresponding species (see FIG. 6B for Ab specificity). In both designs, the focus would be on the measurement of PTEN PK, whereby albumin is considered to play the rather passive role of just providing for the release of active, cell-penetrating PTEN tumor suppressor. Because all three PK assays mentioned above require the same anti-LUD capture Ab, the Applicant first determined whether the commercially available 3A4.1 Ab is fit for bioanalytical PK method development of PR402-like drugs.

[0460] To that end, 50 μl of freshly reconstituted IgG capture beads (Dynabeads BioRad catalog #161-4013) were washed 3× in (PBS+0.1% Tween-20) and mixed with 10 μl of 3A4.1 Ab (Sigma) for 10 min at room temperature (RT) under gentle shaking. Separately, pooled gender total K3-EDTA Sprague Dawley rat plasma (BioIVT, catalog #RAT00PLK3PNN) was diluted 7× with (PBS+0.1% Tween-20) to a final concentration of 16.8 mg/ml and then spiked with either buffer or increasing amounts of semi-pure PR402 (manufactured according to Example 3). The spiked plasma solution was then mixed with the antibody-bead solution in a final reaction volume of 2 ml (final dilution of 3A4.1 mAb was 1:200) and incubated for 1 h at RT under gentle shaking. The beads containing the 3A4.1-PR402 immunoprecipitated complexes were spun and unbound material in the supernatant (i.e., the flowthrough) was collected in a separate tube. The beads were further washed 3× in (PBS+0.1% Tween-20) and finally eluted in 4× Laemmli buffer by heating in the presence of DTT for 10 min at 70° C. The supernatants containing the 3A4.1 immunoprecipitates were loaded on SDS-PAGE and the gel was blotted with the A2B1 anti-PTEN Ab conjugated with HRP.

[0461] FIG. 21A shows that all flowthrough (odd lanes) contain fuzzy smears of highly concentrated proteins in the 45-70 KDa area (question marks), which most likely correspond to rat albumin (RSA). The unspiked control (lane 2) shows that while the 3A4.1 mAb recognizes one faint band at 300 KDa (even lanes, crosses), the eluates are otherwise pretty clean, suggesting that this mAb is quite specific for PR402 and there's little interference by the rat plasma matrix. Less than 5 ng, whereas most likely even just 1 ng of spiked PR402 can be immunoprecipitated by 3A4.1 (FIG. 21A, lanes 6 and 4; stars) under these conditions, suggesting that the 3A4.1 mAb is also quite sensitive in the crude rat plasma matrix.

[0462] The above experiment was repeated using pooled gender total K3-EDTA Cynomolgous monkey plasma (BioIVT, catalog #NHP01PLK3PNN; FIG. 21B). Antibody specificity appears to be very high in this matrix, given that is the 300 KDa contaminant is now absent from the IPs, whereas the fuzzy migration in the 45 KDa area may again be an artifact of simian albumin (SSA) overload in the flowthrough. In contrast, analyte sensitivity is lower in monkey plasma, as the 5 ng PR402 spike is not detectable anymore. Nevertheless, the results altogether collectively suggest that the anti-LUD 3A4.1 is suitable as a capture Ab in the development of an ELISA bioanalytical method to detect PR402-like drugs in the plasma of rat and cynomolgous monkey.

[0463] Given the observed high accuracy of the 3A4.1 mAb in rat and cyno plasma, the Applicant asked if rat organ extracts might also be amenable to the above PK ELISA. To that end, an aged female rat was terminated and its organs collected and homogenized by Teflon in (50 mM Tris pH7.4, 150 mM NaCl, 5 mM EDTA, 1% v/v NP-40, 0.25% w/v deoxycholic acid, 0.1% w/v SDS+cOmplete protease inhibitors). 15 mg/ml of clarified organ homogenates (except for breast: 6 mg/ml) were then spiked with buffer or 50 ng of PR402 and treated as above. FIG. 21C shows that the 3A4.1 mAb IPs are still quite clean, with only one non-specific band appearing at around 50-60 KDa across most organs, except for thymus and brain which contribute an additional strong, seemingly specific band of >100 KDa and a very complicated band pattern, respectively. Hence, an 3A4.1-based ELISA bioanalytical method to detect PR402-like drugs could be useful as a surrogate method to determine PR402 biodistribution in most rat organ matrices but brain and thymus.

[0464] The Applicant then determined whether a C′ terminal PTEN mAb (IP)/F-10 (WB) Ab combination is suitable to measure total intact PR61 (SEQ ID NO:19; cDNA SEQ ID NO:59) levels circulating in the plasma of a subject. As shown in FIG. 6B and determined experimentally in detail by Pulido et al, 2019 (PMID: 31501265), 138G6, SP218 and 17A.1 Abs bind the last amino acids of PTEN-S. Hence, by extension, they should also bind PR61-line proteins. Indeed, when varying quantities of PR61 contained in a crude CHO-3E7 supernatant were spiked into PBS or rat plasma and then subjected to IP-WB with a 138G6/F-10 antibody combination, dose responsive capture of PR61 by 138G6 could be demonstrated (FIG. 21D, lanes 1-10; 120 KDa; stars). However, 138G6 quite specifically captured a 70 KDa and a 50 KDa protein from rat plasma as well, whereas neither of the two proteins could be immunoprecipitated from PBS spiked with PR61 (lane 5, crosses vs. lanes 10 and 6), thereby demonstrating the 70 KDa and 50 KDa activities were actually rat proteins and not CHO-3E7 host cell contaminants. Surprisingly, when the experiment was repeated using whole serum (diluted 20× in PBS) from a stage IV lung cancer patient (subject #2678246; ProMedDx, Norton, MA) using either SP218 or 17A.1 as the capture antibodies in the IP, specific capture of PR61 by both antibodies could be demonstrated as well, yet again, both SP218 and 17A.1 co-precipitated both the 50 KDa and the 70 KDa protein (FIG. 21E, lane 1 vs. 3 and 5 vs. 7 and data not shown for 17A.1). Thus, two PTEN-like proteins existing in rat plasma and the serum of a cancer patient cross-react with all available C-terminal mAbs that could measure intact PTEN-S, strongly limiting the accuracy of such an ELISA-based PK method for PR61-like proteins.

[0465] Difficulty of measuring the PK levels of a recombinant human protein that is exogenously dosed into a subject because of interference by the same protein present in the host is a known problem in the art. Such issues can be resolved by combining an antibody-based analyte capture with protease digestion, liquid chromatography separation and Mass Spectrometry of the resulting digested immune complexes. This technique, referred to as MSIA (Mass Spec Immune Assay) could be relevant for PK measurement of PR61-like drugs. Inspection of the HSA, SSA and RSA sequences (SEQ ID NO:13, 91 and 90), indicates that the Asp-N endopeptidase, which cleaves specifically bonds with Asp in position P1′ could be relevant for the development of this MSIA. Accordingly, the cleavage of the last Asp residue on albumin, which is D562, D562 and D565 would release 23aa, 22aa and 21aa-long peptides by HSA, RSA and MSA, respectively. Downstream of albumin and into the PTEN-S protein, the first Asp-N cleavage is predicted to be on D19. Hence, Asp N-based MSIA for a PR61-like protein would release unique signature peptides of 42aa, 41aa and 40aa, respectively (excluding of course the presence of a linker between the two domains, in which case the signature peptide length would increase by the size of the linker or the Asp-degradate thereof). As these signature peptides would span the albumin-PTEN junction, they would be unique and hence enable the development of an accurate PK method.

[0466] In another aspect, the experiment of FIG. 21E also demonstrates that PR61 (SEQ ID NO:19; cDNA SEQ ID NO:59) contained in a crude source like the CHO-3E7 supernatant (which is rich in cell debris and proteases released therefrom) is nevertheless very stable upon prolonged incubation (8 h) in either PBS (physicochemical stability) or cancer serum (resistance to proteases released from cell debris) (FIG. 21E, lanes 2 vs. 6 and 4 vs. 8). This bodes well with the excellent stability of PR402 (SEQ ID NO:28; cDNA SEQ ID NO:68), and other such fusions including but not limited to PR405 (SEQ ID NO:129; cDNA SEQ ID NO:157), PR406 (SEQ ID NO:130; cDNA SEQ ID NO:158), PR407 (SEQ ID NO:131; cDNA SEQ ID NO:159) and PR408 (SEQ ID NO:132; cDNA SEQ ID NO:160), during an overnight incubation with active proteases in vitro (FIG. 15). This stability is particularly relevant for the developability of the albumin-PTEN fusions, as discussed further below.

[0467] In summary, following extensive characterization of the major expression systems, vectors and host cells, a number of “permissive” novel albumin-PTEN fusion, polynucleotides (for example cDNAs) are disclosed herein that are expressed and/or can be manufactured in high amounts, while retaining PTEN tumor suppressor function. The cDNAs and proteins of the present disclosure are therefore suitable for both gene and protein therapy of a subject in need thereof.

### Example 7. Tumor Suppressor Function of Albumin-PTEN Fusion Proteins

[0468] The Applicant determined whether the PTEN albumin fusions disclosed herein possess tumor suppressor function against other cancer cell lines of rodent or human origin with varying endogenous PTEN levels, i.e., cell lines containing wild-type or mutant PTEN or no endogenous PTEN at all.

[0469] 1 liter (LT) of FreeStyle™ CHO-S Cells (ThermoFisher Catalog number: R80007) were transiently transfected with pTT5 PR61 (SEQ ID NO:19; cDNA SEQ ID NO:59) and grown as recommended by the manufacturer. Cells and media were collected 6 days post-transfection. Viability upon collection was around 50%. The cell supernatant was loaded directly on a 1 ml nickel-sepharose column (Cytiva, Cat. No. 11-0004-58), purified and filter-sterilized in PBS buffer as disclosed above herein, to yield 25 mg of semi-purified protein at a concentration of 1.74 mg/ml, as determined by Bradford protein assay using BSA as a standard (ThermoFisher, Cat. No. 23236). The purity of PR61 was estimated at around 30% by densitometric analysis of the Coomassie Blue-stained SDS-PAGE gel under non-reducing condition (FIG. 22A, lane 2).

[0470] In another embodiment, 1 μM of the above semi-purified PR61 (SEQ ID NO:19) was brought into contact with 500 cells, as follows: PC3 (human prostate cancer; PTEN-null); MSTO-211 (human lung cancer; PTEN-null); A2780 (human ovarian cancer; PTEN-null); 4T1 (mouse triple-negative breast cancer; mutant PTEN); SW403 (human colorectal cancer; mutant PTEN); SKMEL28 (human melanoma; mutant PTEN); HCT116 (human colorectal cancer; normal PTEN); 786-0 (human renal cell carcinoma; mutant PTEN); T47D (human triple negative breast cancer; mutant PTEN); SK-BR-3 (human triple negative breast cancer; mutant PTEN); A375 (human melanoma; mutant PTEN); MIA-PaCa-2 (human pancreatic cancer; mutant PTEN); and SNU-398 (human liver cancer; mutant PTEN). Following an incubation of 2 h at 37° C. with either PR61 in PBS buffer or just PBS, the media were removed, cells were washed, lysed and processed for Caspase 3/7-Glo Luciferase assay, as described earlier. As shown in FIG. 22B-FIG. 22C, exogenous PR61 is able to penetrate all cancer cells studied to initiate their kill, regardless of the existence or not of endogenous mutant or wild-type PTEN. Although the kill is quite effective in most cases, SKMEL28 and HCT116 appear to contribute a high basal level of luciferase activity. However, this is most likely due to the assay being out of the linear range in both cases; indeed, if the assay is performed in 1,000 or 1,500 PC3 cells, the 5-6 fold window observed (FIG. 22B) with 500 cells is also reduced to 1.5-fold (results not shown).

[0471] These results show that albumin-PTEN fusions such as PR61 (SEQ ID NO:19; cDNA SEQ ID NO:59) are useful in successfully treating the great majority of human cancers.

### Example 8. Generation of Recombinant Oncolytic Herpes Simplex Viruses that can be

[0472] used to express and secrete PTEN and albumin-PTEN fusion proteins in the conditioned medium of cultured cancer cells.

[0473] The Applicant inserted SEQ ID NO:223, SEQ ID NO:226 and SEQ ID NO:229 cDNAs between engineered EcoRV-NsiI overhangs into the pHG52d34.5 plasmid, to generate pHG52d34.5-CMV-PR41 (SEQ ID NO:225), pHG52d34.5-CMV-PR61 (SEQ ID NO:228) and pHG52d34.5-CMV-PR71 (SEQ ID NO:231) intermediate plasmids expressing respectively:

[0474] PR41, with cDNA SEQ ID NO:223 and protein SEQ ID NO:224, wherein PR41 corresponds to human pre-PTEN-L (SEQ ID NO:1) but with an Met174Ile mutation that eliminates the translational initiation site of PTEN-S within PTEN-L. The resulting oHSV2-PR41 virus is intended to express wild-type, non-optimized human PTEN-L to the extent possible (e.g. without additional PTEN-S expression).

[0475] PR61Δ6H, with cDNA SEQ ID NO:226 and protein SEQ ID NO:227, wherein PR61ΔH is identical to PR61 (cDNA SEQ ID NO:59 and protein SEQ ID NO:19), except the 6His tag (SEQ ID NO: 243) was eliminated in PR61ΔH. The resulting oHSV2-PR61 virus is intended to express a tagless HSA-PTEN-S fusion for potential clinical applications. Note that PR61Δ6H may be labeled or referred to simply as PR61.

[0476] PR71, with cDNA SEQ ID NO:229 and protein SEQ ID NO:230, wherein immediately after the 3′ of PR41 (nt 1728 of SEQ ID NO:229, corresponding to residue 576 of SEQ ID NO:230) a GGGGGS linker (SEQ ID NO: 248) (nt 1729-1746 of SEQ ID NO:229; residues 576-581 of SEQ ID NO:230) and the wild-type Fc (fragment crystallizable of human IgG1, except for the last C-term Lys residue; nt 1747-end of SEQ ID NO:229; residues 582-end of SEQ ID NO:230) have been fused. The objective of Fc fusion is to potentially increase the cytotoxic ability (e.g. by NK cell recruitment) and or half-life of mature human PTEN-L.

[0477] The two viral strains HSV-1 and HSV-2 share about 80% overall homology. Both can be rendered oncolytic as described herein. However, without being bound by theory, oHSV2 may be more efficacious than oHSV1 at times (Fu et al, 2018; PMID: 29765544). Accordingly, oHSV2-PR41, oHSV2-PR61Δ6H, oHSV2-PR71, oHSV2-GFP and oHSV2-GMCSF oncolytic ΔICP47/ΔICP34.5 viruses were constructed in an HSV-2 background using the process of FIG. 6D, as follows (FIG. 23A).

[0478] First, HG52, a rather safe version of HSV-2 (Dolan et al, 1998; PMID: 9499055; GenBank: Z86099.2; ncbi.nlm.nih.gov/nuccore/Z86099.2), was rendered safer and oncolytic by deletion of the ICP47 gene (FIG. 6D, third row). Then, plasmid pHG52d34.5-CMV-GMCSF was recombined into the ICP34.5 locus to eliminate the HSV neuro virulence factor (FIG. 23A), leading to the creation of the oncolytic oHSV2-GMCSF (ΔICP34.5/ΔICP47) control virus used herein (FIGS. 24-25).

[0479] pHG52d34.5-CMV-GFP, a control plasmid, was then recombined into the oHSV2-GMCSF virus (FIG. 6D, second row), thereby replacing GMCSF with the control Green Fluorescent Protein (GFP) to create the oHSV2-GFP (ΔICP34.5/ΔICP47) control virus used herein (FIGS. 24-25).

[0480] The recombinant plasmids pHG52d34.5-CMV-PR41 (SEQ ID NO:225), pHG52d34.5-CMV-PR61Δ6H (SEQ ID NO:228) and pHG52d34.5-CMV-PR71 (SEQ ID NO:231) were sequenced fully to confirm 100% identity of the insert. They were then used to recombine PR41, PR61Δ6H and PR71 cDNAs into the oHSV2-GFP virus from the above step, thereby generating oHSV2-PR41, oHSV2-PR61Δ6H and oHSV2-PR71 recombinant viruses, respectively (FIG. 23A, third row). All 3 recombinant oncolytic viruses oHSV2-PR41, oHSV2-PR61Δ6H and oHSV2-PR71 are devoid of both the ICP47 and ICP34.5 proteins (FIG. 23A).

[0481] The full genomic sequence of the oncolytic oHSV2-PR61Δ6H recombinant virus is disclosed as SEQ ID NO:241 (see also FIG. 23D). Full genomic sequences of oHSV2-PR41 and oHSV2-PR71 can be easily inferred by those skilled in the art by simply locating the segment corresponding to SEQ ID NO:228 in SEQ ID NO:241 and replacing it with SEQ ID NO:225 or SEQ ID NO:231, respectively.

[0482] All oHSV2 recombinant viruses generated herein were screened by PCR using appropriate primers and sequenced to confirm the expected insert identity and size.

[0483] In other embodiments, the viruses were tested for their ability to drive expression of foreign proteins in competent cell lines, that is, cells that are permissive for viral infection and viral replication.

[0484] In one example, as shown in FIG. 23B, 293T human embryonic kidney cells were infected with oHSV2-GFP or HSV2-PR61 at a low MOI of 0.05. 24 h or 96 h post-transfection, the media were removed, and cells lysed in Laemmli buffer. Aliquots of total cell lysates were run in SDS-PAGE followed by Western Blot using the pan-PTEN mAb F-1. As shown in FIG. 23B, 293T cells express both endogenous PTEN-S (55 KDa) and PTEN-L (72 KDa), but also exogenous PR61 (130 KDa; SEQ ID NO:227) upon infection with oHSV2-PR61, yet not oHSV2-GFP infection. PR61 (SEQ ID NO:227) is detectable at 24 h and appears to be quite stable, and potentially also in higher amounts at 96 h post-infection.

[0485] In another example, VERO cells were infected with oHSV2-GFP or oHSV2-PR41 virus at a MOI of 1.0. Cell supernatants were collected at 24 h, 48 h and 96 h and aliquots thereof were measured for PTEN levels by a pan-PTEN ELISA (Fine Test, Wuhan, China, Catalog No. EH1661). As shown in FIG. 23C, there is significant secretion of PR41 (mature PTEN-L with Met174Ile; SEQ ID NO:224) in the supernatant of cells infected with oHSV2-PR41 but not oHSV2-GFP virus at 24 h. Only background levels of secreted PR41 (SEQ ID NO:224) are detected at later time points (FIG. 23C). Similarly, oHSV-PR71 infection of B16R (mouse melanoma stably expressing the HSV receptor) and CT26 (mouse colorectal cancer) also leads to specific secretion of PR71 protein (SEQ ID NO:230) in the conditioned medium (data not shown).

[0486] It can be concluded that recombinant oncolytic HSV-2 can cause expression and secretion of PTEN and albumin-PTEN fusions in the conditioned medium of virally infected cancer cells.

### Example 9. In Vivo Use of Albumin-PTEN Fusion Proteins

[0487] The Applicant determined whether the PTEN albumin fusions disclosed herein possess tumor suppressor function in a standardized syngeneic model of mouse colorectal cancer (CT26). This example illustrates in vivo efficacy and other cancer or tumor types can be substituted for colorectal cancer.

[0488] CT26 mouse colorectal cancer cells were suspended in 0.05 ml of DMEM/F12 SFM (Serum Free Medium) and subcutaneously (s.c.) injected into the right interscapular area of immune-competent female Balb/c mice (6 weeks old and 16-17 g weight). The tumor size and body weight were measured 5 days after tumor inoculation when the tumors reached a palpable size (about 100 mm³). Tumor volumes were calculated with the following formula: volume=(length×width²)/2. The mice were separated into groups with an even distribution of tumor volumes (n=10 animals per group) on day 1. The groups were treated by direct intra-tumoral injection of the following agents: 1×10⁶ CCID₅₀ of oHSV2-GMCSF, oHSV2-GFP or oHSV2-PR61 in 100 μl volume, or 100 μl of viral formulation buffer (control), on days 1, 4 and 7. The tumor burden (determined by caliper measurement) and body weight of each mouse were measured every 3 days thereafter. Mice were euthanized by cervical dislocation when tumor volumes reached 2,000 mm³ or when animals showed distress, to avoid unnecessary suffering.

[0489] FIG. 24 demonstrates that treatment of CT26 tumor-bearing mice with oHSV2-PR61 resulted in a statistically significant tumor growth inhibition vs. untreated mice. This result is quite remarkable given the low level homology of mouse to human serum albumin (only 72% identity at the protein level) (whereas PTEN-S is essentially identical between mouse and human). Thus, the oHSV2-PR61 virus is useful in successfully treating mouse colorectal cancer in the syngeneic setting.

### Example 10. In Vivo Overall Survival Established for the Albumin-PTEN Fusion Proteins

[0490] The Applicant compared the overall survival of untreated mice in the CT26 syngeneic model in response to four test viruses, oHSV2-GMCSF, oHSV2-GFP, oHSV2-PR41, oHSV2-PR61 and oHSV2-PR71, in the presence or absence of an anti-mouse PD1 monoclonal antibody (FIG. 25A). Mice were grafted subcutaneously with CT26 cells and tumors were allowed to grow until 100 mm³. On day 1 (D1), mice were randomly split in 10 groups of 10 and injected intratumorally once with 1×10⁶ CCID₅₀ in 100 μl virus per mouse, or with 100 μl virus buffer control (IS buffer), on D1 and D4 (total of two injections of virus or control); followed by a single intra-peritoneal injection of 250 μg (per mouse) of an anti-mouse PD1 monoclonal antibody (BioXCell clone BE0146/RMP1-14), or a control solution (InVivoPure pH 7.0 Antibody Dilution Buffer; BioXCell Catalog No. IP0070), on Day 7, Day 10 and Day 14 (total of 3 anti-PD1 or dilution buffer injections). Mice were followed for weight loss, tumor volume and overall survival. Mice were deemed dead if tumor volume exceeded 1,500 mm³ (FIG. 25A).

[0491] There was no appreciable weight loss in any of the mice. The Overall Survival (OS) of the mice was plotted on a Kaplan-Meier chart (FIG. 25B). To allow for better visualization of individual plots, the chart of FIG. 25B was broken down in several charts containing select arms, as shown (FIG. 25C-25F). The median survival of the mice in each arm can be calculated directly from chart FIG. 25B, and is summarized in Table 2.

TABLE 2
Median Survival of the CT26 model

| | | | oHSV2- | oHSV2- | oHSV2- |
|---|---|---|---|---|---|
| | Control | oHSV2-GFP | PR41 | PR61 | PR71 |
| No-anti PD1 | 12.0 | 25.0 | 21.0 | 25.0 | 18.0 |
| +anti-PD1 | 25.0 | 21.0 | 26.5 | 37.5 | 26.5 |

[0492] The various survival curves were assessed for statistical significance according to the log-rank (Mantel-Cox) test on day 80 (D70). The P values of pairwise comparisons are shown in FIG. 25G.

[0493] All single-agent treatments except for oHSV2-PR71 increased median OS vs placebo (FIG. 25G, last row). Even though oHSV2-PR61 monotherapy increased the median survival (Table 2), it did not increase overall survival when compared to oHSV2-PR41, oHSV2-PR71 or oHSV2-GFP monotherapy (FIG. 25G). However, addition of anti-PD1 to oHSV2-PR61 pre-treated mice did increase overall survival when compared to oHSV2-PR61 monotherapy (FIG. 25G: p=0.0313*). Note that one mouse treated with the oHSV2-PR61+aPD1 combination was completely cured at D80, as opposed to no surviving mice for in the oHSV2-PR61 monotherapy group (FIG. 25E), demonstrating that the said increase in overall survival (p=0.0313*) is definitive.

[0494] In contrast to oHSV2-PR61, anti-PD1 addition to either oHSV2-GFP or oHSV2-PR41 failed to increase overall survival vs. each agent acting alone (FIG. 25G: p=0.9454/ns; and p=0.6928/ns, respectively). [Note that the significant increase seen with oHSV2-PR71+aPD1 vs. oHSV2-PR71 alone (FIG. 25G: p=0.023*) is deemed irrelevant because the oHSV2-PR71 monotherapy failed to increase survival over placebo (FIG. 25G: p=0.5347/ns); as such, the survival increase by oHSV2-PR71+aPD1 is practically attributed to the function of the anti-PD1 antibody].

[0495] Zhong et al, 2020; PMID: 31898484 suggested that CT26 syngeneic tumors are not responsive to anti-PD1 therapy. However, the very opposite is observed in the Applicant's result, where treatment with anti-PD1 monotherapy increases OS vs. placebo (FIG. 25G: p=0.0013/**). Despite the foregoing, addition of oHSV2-PR61 to anti-PD1 almost reached statistical significance vs. anti-PD1 monotherapy (FIG. 25G: p=0.0553/ns), suggesting that oHSV2-PR61 is likely to synergize with anti-PD1 in an animal model that is less responsive or resistant to anti-PD1 antibody monotherapy. Non-limiting examples of anti-PD1 resistant models are the AKR mouse esophageal syngeneic cancer model (Sugawara et al, 2021; PMID: 32346610), the 4T1 mouse triple negative breast cancer model (Kim et al, 2018; PMID: 30288347), etc.

[0496] In contrast to syngeneic models, immunocompromised models such as the SCID mouse, typically mediate higher viral replication since they are not attacked by the immune system, leading to higher transgene expression. It is anticipated that such immunocompromised models will deliver very strong oHSV2-PR61 monotherapy anti-cancer responses, including increased overall survival. Non-limiting examples of human cell lines that can grafted onto such immunocompromised mice can be found in FIG. 22.

[0497] Thus, the Applicant has surprisingly determined that PTEN-S containing fusion proteins differ significantly in their ability to mediate co-operation with a mouse anti-PD1 antibody, wherein only an albumin-PTEN-S fusion (SEQ ID NO:227) is able to mediate said anti-PD1 synergy, wherein other PTEN-S-containing fusions (such as PTEN-L: SEQ ID NO:224 and PTEN-L-Fc: SEQ ID NO:230) are unable to do so. The results further suggest that expressing a PTEN-S fusion protein in mice tumor tissues is not sufficient to mediate anti-PD1 synergy, wherein the exact identity of the expressed PTEN-S fusion protein will dictate said synergy, and wherein the identification of the PTEN-S protein is not obvious to a skilled person in the art, given that the PTEN-S protein (fusion) synergizing with anti-PD1 must be determined experimentally.

[0498] The oHSV2-GMCSF virus has displayed an excellent preclinical safety pharmacology and toxicology profile in primates (Wang et al, 2019; PMID: PMID: 30499341). Consistently, oHSV2-GMCSF has progressed into phase II studies in China with minimal biosafety and adverse events in human patients (Zhang et al, 2021: PMID: 33837053). Hence, oHSV2-PR61 is likely to be clinically relevant for human patients either as monotherapy or in combination with an established anti-PD1 treatment.

### Example 11. Generation of an Anti-PD1 Single-Chain Fragment Variable Antibody

[0499] A single-chain fragment variable (scFv) antibody fragment of the FDA-approved human anti-PD1 Ab nivolumab (Opdivo™) was generated, based on published sequences (access No 5WT9_H and 5WT9_L for the high and light nivolumab chain respectively).

[0500] The domain structure of this scFv, is as follows: N-term-IgG1 signal peptide-V_{L}-(GGGGS)₃-V_{H}-(H)₆-C′ term, where the IgG1 signal peptide is SEQ ID NO:101, V_{L} and V_{H} are the variable regions of the light and high nivolumab chains, (GGGGS)₃ (SEQ ID NO: 249) is a flexible glycine-serine linker and H6 is an hexahistidine tag (SEQ ID NO: 243), respectively. The cDNA and protein sequences of nivolumab scFv are disclosed as SEQ ID NO:222 and SEQ ID NO:232, respectively.

[0501] The scFv cDNA (SEQ ID NO:222) was subcloned in the mammalian expression vector pTT5 and the vector was transfected in Expi293 CHO cells using standard procedures. Aliquots of the control transfected cell supernatants were obtained at 72 h post-transfection, loaded on reducing and non-reducing SDS-PAGE and the gel was stained with an anti-6His antibody (SEQ ID NO: 243). FIG. 26A shows nivolumab scFv migrates at the expected molecular weight of 25 KDa under both conditions. This corresponds to the scFv monomer, which is predominant, whereas a very faint band can be appreciated at around 50 KDa, which is consistent with the scFv dimer. Thus, in a preferred embodiment, a single-chain anti-PD1 antibody can be effectively produced and secreted in the supernatant of CHO cells.

[0502] In another aspect, the nivolumab anti-scFv is purified in large scale using standard processes known in the art, such as a combination of ion exchange, gel filtration and affinity chromatographies (see for instance Song et al, 2015: PMID: 26297993), and provided together with oncolytic virotherapy of albumin-PTEN fusions to a subject in need thereof.

[0503] In another embodiment, the anti-PD1 scFv is derived from pembrolizumab (Keytruda™), having a similar domain structure as above: N-term-IgG1 signal peptide-V_{L}-(GGGGS)₃-V_{H}-(H)₆-C′ term. The cDNA and protein sequences of pembrolizumab scFv are disclosed as SEQ ID NO:235 and SEQ ID NO:236, respectively.

[0504] In other embodiments, the anti-PD1 antibody or scFv is derived from sintilimab, tislelizumab, toripalimab, camrelizumab geptanolimab serplulimab zimberelimab cemiplimab, dostarlimab, prolgolimab, balstilimab, penpulimab, retifanlimab, cadonilimab, pucotenlimab, sasanlimab, or cetrelimab.

[0505] In other embodiments, the anti-PD1 scFv is derived from an anti-mouse PD1 antibody, such as BioXCell clone BE0146/RMP1-14.

[0506] In one embodiment, the purified anti-PD1 scFv protein is given to a subject prior to, or after the oncolytic virotherapy with an albumin-PTEN fusion. In another embodiment, the two modalities are administered concurrently. In yet another, more preferred embodiment, the anti-PD1 scFv is administered 24 h, 48 h, 72 h or 96 h after the albumin-PTEN virotherapy. In other embodiments, virotherapy can be given twice, thrice or four times or more, before an anti-PD1 protein therapy is administered, the latter being for one, two, three or more times.

[0507] In another preferred embodiment, an oncolytic virus can be generated harboring two payload cDNAs, such as an albumin-PTEN fusion like PR61 (SEQ ID NO:226) and a scFv like nivolumab (SEQ ID NO:222) using the pPiggyBac-dual promoter vector (SEQ ID NO:233). The albumin-PTEN fusion cDNA (SEQ ID NO:226) is inserted in the vector as an EcoRI fragment, hence it is expressed under the control of the CMV promoter. Then, the scFv cDNA (e.g. SEQ ID NO:222) is inserted as a HindIII-HpaI fragment, it being under the control of the EF-1α promoter. Finally, the vector is recombined into an oncolytic HSV2 backbone such as the oHSV2-GMCSF or oHSV2-GFP virus to create an oHSV2-PR61-scFv virus. See for example, a dually loaded virus as shown in FIG. 26B.

[0508] In yet another embodiment, the EF-1α promoter driving the scFv expression (see FIG. 26B) is replaced with the strict-late HSV-1 promoter UL38p (SEQ ID NO:234) that can drive gene expression starting at 48-72 h post-infection (Flanagan et al, 1991: PMID: 1846198; Fu et al, 2003: PMID: 12900760). For example, a single cDNA fragment is synthesized to include SEQ ID NO:226; SEQ ID NO:234 and SEQ ID NO:222. The composite fragment is cloned under EcoRI-HpaI into the pPiggyBac vector and then recombined into an oHSV2 backbone such as the oHSV2-GMC SF or oHSV2-GFP virus (FIG. 23A). This setting allows the anti-PD1 scFv to be expressed 3-4 days after the albumin-PTEN fusion, thereby creating similar conditions as those used in FIG. 25, namely that the anti-PD1 protein is injected 3-4 days after the second or third viral injection. Such a dually armed virus would be much more convenient for patients (1 injection for 2 treatments) and much more cost-effective too.

[0509] In another embodiment, the scFv is derived from an anti-PD-L1 antibody molecule like atezolizumab (Tecentric™), having a similar domain structure as above: N-term-IgG1 signal peptide-V_{L}-(GGGGS)₃-V_{H}-(H)₆-C′ term. The cDNA and protein sequences of atezolizumab scFv are disclosed as SEQ ID NO:237 and SEQ ID NO:238, respectively.

[0510] In other embodiments, scFvs against other PD-L1 antibodies are derived, such as avelumab and durvalumab.

[0511] In other embodiments, scFvs against VEGF (e.g. bevacizumab, ramucirumab), HER2 (e.g. trastuzumab), anti-EGF (e.g. cetuximab) can be generated and co-administered with the albumin-PTEN oncovirotherapy. In one example, the anti-VEGF scFv is bevacizumab. The cDNA and protein sequences of bevacizumab scFv are disclosed as SEQ ID NO:239 and SEQ ID NO:240, respectively.

### EQUIVALENTS

[0512] It is to be understood that while the disclosure has been described in conjunction with the above embodiments, that the foregoing description and examples are intended to illustrate and not limit the scope of the disclosure. Other aspects, advantages and modifications within the scope of the disclosure will be apparent to those skilled in the art to which the disclosure pertains.

[0513] The disclosures illustratively described herein may suitably be practiced in the absence of any element or elements, limitation or limitations, not specifically disclosed herein. Thus, for example, the terms “comprising”, “including,” “containing”, etc. shall be read expansively and without limitation. Additionally, the terms and expressions employed herein have been used as terms of description and not of limitation, and there is no intention in the use of such terms and expressions of excluding any equivalents of the features shown and described or portions thereof, but it is recognized that various modifications are possible within the scope of the disclosure claimed.

[0514] Thus, it should be understood that although the present disclosure has been specifically disclosed by preferred embodiments and optional features, modification, improvement and variation of the disclosures embodied therein herein disclosed may be resorted to by those skilled in the art, and that such modifications, improvements and variations are considered to be within the scope of this disclosure. The materials, methods, and examples provided here are representative of preferred embodiments, are exemplary, and are not intended as limitations on the scope of the disclosure.

[0515] The disclosure has been described broadly and generically herein. Each of the narrower species and subgeneric groupings falling within the generic disclosure also form part of the disclosure. This includes the generic description of the disclosure with a proviso or negative limitation removing any subject matter from the genus, regardless of whether or not the excised material is specifically recited herein.

[0516] In addition, where features or aspects of the disclosure are described in terms of Markush groups, those skilled in the art will recognize that the disclosure is also thereby described in terms of any individual member or subgroup of members of the Markush group.

[0517] All publications, patent applications, patents, and other references mentioned herein are expressly incorporated by reference in their entirety, to the same extent as if each were incorporated by reference individually. In case of conflict, the present specification, including definitions, will control.

Lengthy table referenced here
US20230295268A1-20230921-T00001
Please refer to the end of the specification for access instructions.

### REFERENCES

[0518] Altino\check{g}lu et al, 2016: PMID: 27748775. Intracellular delivery of the PTEN protein using cationic lipidoids for cancer therapy. Biomater Sci. 2016 Nov. 15; 4(12):1773-1780.
[0519] Biniossek et al, 2011: PMID: 21967108. Proteomic identification of protease cleavage sites characterizes prime and non-prime specificity of cysteine cathepsins B, L, and S. J Proteome Res. 2011 Dec. 2; 10(12):5363-73. doi: 10.1021/pr200621z. Epub 2011 Oct. 26. Erratum in: J Proteome Res. 2011 Dec. 2; 10(12):5577.
[0520] Bonamassa et al, 2011: PMID: 21191634. Hydrodynamic gene delivery and its applications in pharmaceutical research. Pharm Res. 2011 April; 28(4):694-701. doi: 10.1007/s11095-010-0338-9. Epub 2010 Dec. 30.
[0521] Bourbeau et al, 2007: PMID: 17409449. Improvement of antitumor activity by gene amplification with a replicating but nondisseminating adenovirus. Cancer Res. 2007 Apr. 1; 67(7):3387-95.
[0522] Braun & Sauter, 2019: PMID: 31406574. Furin-mediated protein processing in infectious diseases and cancer. Clin Transl Immunology. 2019 Aug. 5; 8(8):e1073. doi: 10.1002/cti2.1073. eCollection 2019.
[0523] Champiat et al, 2021: PMID: 32943460. Intratumoral Immunotherapy: From Trial Design to Clinical Practice. Clin Cancer Res. 2021 Feb. 1; 27(3):665-679. doi: 10.1158/1078-0432. CCR-20-0473. Epub 2020 Sep. 17. DOI: 10.1158/1078-0432. CCR-20-0473.
[0524] Chen & Eng, 2019: PMID: 30928438. PTEN Mutations Trigger Resistance to Immunotherapy. Trends Mol Med. 2019 June; 25(6):461-463. doi: 10.1016/j.molmed.2019.03.003. Epub 2019 Mar. 27.
[0525] Chen et al, 2020: PMID: 32547566. Looking for the Optimal PD-1/PD-L1 Inhibitor in Cancer Treatment: A Comparison in Basic Structure, Function, and Clinical Practice. Front Immunol. 2020 May 29; 11:1088. doi: 10.3389/fimmu.2020.01088. eCollection 2020.
[0526] Dolan et al, 1998: PMID: 9499055. The genome sequence of herpes simplex virus type 2. J Virol. 1998 March; 72(3):2010-21. doi: 10.1128/JVI.72.3.2010-2021.1998.
[0527] Durocher & Loignon, 2009:patents.google.com/patent/U.S. Pat. No. 8,637,315
[0528] Feng & Tsao, 2016: PMID: 27699004. Emerging role of microRNA-21 in cancer. Biomed Rep. 2016 October; 5(4):395-402. Epub 2016 Aug. 26.
[0529] Flanagan et al, 1991: PMID: 1846198. Analysis of the herpes simplex virus type 1 promoter controlling the expression of UL38, a true late gene involved in capsid assembly. J Virol. 1991 February; 65(2):769-86. doi: 10.1128/JVI.65.2.769-786.1991. PMCID: PMC239817 DOI: 10.1128/JVI.65.2.769-786.1991
[0530] Fu et al, 2003: PMID: 12900760. A strict-late viral promoter is a strong tumor-specific promoter in the context of an oncolytic herpes simplex virus. Gene Ther. 2003 August; 10(17): 1458-64. doi: 10.1038/sj.gt.3302029.
[0531] Fu et al, 2018: PMID: 29765544. Comparison of infectivity and spread between HSV-1 and HSV-2 based oncolytic viruses on tumor cells with different receptor expression profiles. Oncotarget. 2018 Apr. 20; 9(30):21348-21358. PMCID: PMC5940406 DOI: 10.18632/oncotarget.25096
[0532] Gilbert et al, 2013. A Cell Line for Large-Scale Production of Nondisseminative Adenoviral Vectors (Deleted of Protease [PS] Gene) for Cancer Therapy and Vaccination. Abstract #135; DOI: 10.1016/S1525-0016(16)34470-7.
[0533] Gilbert R et al, 2014: PMID: 25159033. Establishment and validation of new complementing cells for production of E1-deleted adenovirus vectors in serum-free suspension culture. J Virol Methods. 2014 November; 208:177-88. doi: 10.1016/j.jviromet.2014.08.013. Epub 2014 Aug. 23.
[0534] Goswami et al, 2019: PMID: 31069169; Gene Therapy Leaves a Vicious Cycle. Front Oncol. 2019 Apr. 24; 9:297. doi: 10.3389/fonc.2019.00297. eCollection 2019
[0535] Grundy et al, 2021: PMID: 33426913. Improved therapeutic antibody delivery to xenograft tumors using cavitation nucleated by gas-entrapping nanoparticles. Nanomedicine (Lond). 2021 January; 16(1):37-50. doi: 10.2217/nnm-2020-0263. Epub 2021 Jan. 11.
[0536] Güller-Gane et al, 2016: PMID: 27195765. Overcoming the Refractory Expression of Secreted Recombinant Proteins in Mammalian Cells through Modification of the Signal Peptide and Adjacent Amino Acids. PLoS One. 2016 May 19;11(5):e0155340. doi: 10.1371/journal.pone.0155340. eCollection 2016.
[0537] Haq et al, 2019; PMID: 31506193. Evaluation of recombinant adenovirus vectors and adjuvanted protein as a heterologous prime-boost strategy using HER2 as a model antigen. Vaccine. 2019 Nov. 8; 37(47):7029-7040. doi: 10.1016/j.vaccine.2019.08.079. Epub 2019 Sep. 7.
[0538] Hopkins et al, 2013: PMID: 23744781; A secreted PTEN phosphatase that enters cells to alter signaling and survival. Science. 2013 Jul. 26; 341(6144):399-402. doi: 10.1126/science.1234907. Epub 2013 Jun. 6.
[0539] Jablońska-Trypuć et al, 2016: PMID: 27028474. Matrix metalloproteinases (MMPs), the main extracellular matrix (ECM) enzymes in collagen degradation, as a target for anticancer drugs. J Enzyme Inhib Med Chem. 2016;31(supl):177-183. Epub 2016 Mar. 30.
[0540] Kaygisiz & Synatschke, 2020: PMID: 33025967. Materials promoting viral gene delivery. Biomater Sci. 2020 Nov. 21; 8(22):6113-6156. doi: 10.1039/d0bm01367f. Epub 2020 Oct. 7.
[0541] Kim et al, 2021: PMID: 30288347. Combination with SGT-53 overcomes tumor resistance to a checkpoint inhibitor. Oncoimmunology. 2018 Aug. 1; 7(10):e1484982. doi: 10.1080/2162402X.2018.1484982. eCollection 2018.
[0542] Kudelka et al, 2015: PMID: 25727146. Simple sugars to complex disease—mucin-type O-glycans in cancer. Adv Cancer Res. 2015; 126:53-135. doi: 10.1016/bs.acr.2014.11.002. Epub 2015 Feb. 7. Review.
[0543] Larocca et al, 2020: PMID: 32767272. An Update on the Role of Talimogene Laherparepvec (T-VEC) in the Treatment of Melanoma: Best Practices and Future Directions. Am J Clin Dermatol. 2020 December; 21(6):821-832. doi: 10.1007/s40257-020-00554-8.
[0544] Latvala et al, 2017: PMID: 28402755. Distribution of FcRn Across Species and Tissues. J Histochem Cytochem. 2017 June; 65(6):321-333. PMC5625855 DOI: 10.1369/0022155417705095 Epub 2017 Apr. 12.
[0545] Li C et al, 2018: PMID: 29316891. Serum miR-486-5p as a diagnostic marker in cervical cancer: with investigation of potential mechanisms. BMC Cancer. 2018 Jan. 9; 18(1):61. doi: 10.1186/s12885-017-3753-z.
[0546] Li Y et al, 2018: PMID: 29704427. Cancer/testis antigen-Plac1 promotes invasion and metastasis of breast cancer through Furin/NICD/PTEN signaling pathway. Mol Oncol. 2018 August; 12(8):1233-1248. doi: 10.1002/1878-0261.12311. Epub 2018 Jun. 14.
[0547] Liang et al, 2014: PMID: 24768297. PTENα, a PTEN isoform translated through alternative initiation, regulates mitochondrial function and energy metabolism. Cell Metab. 2014 May 6;19(5):836-48. doi: 10.1016/j.cmet.2014.03.023. Epub 2014 Apr. 24.
[0548] Liang et al, 2017: PMID: 28332494. PTENβ is an alternatively translated isoform of PTEN that regulates rDNA transcription. Nat Commun. 2017 Mar. 23; 8:14771. doi: 10.1038/ncomms14771.
[0549] Macedo et al, 2020: PMID: 33046622. Clinical landscape of oncolytic virus research in 2020. J Immunother Cancer. 2020 October; 8(2):e001486. doi: 10.1136/jitc-2020-001486.
[0550] Mahmoodi Chalbatani G et al, 2019: PMID: 31118626. Small interfering RNAs (siRNAs) in cancer therapy: a nano-based approach. Int J Nanomedicine. 2019 May 2; 14:3111-3128. doi: 10.2147/HN.S200253. eCollection 2019.
[0551] Malaney et al, 2013: PMID: 24056727. The PTEN Long N-tail is intrinsically disordered: increased viability for PTEN therapy. Mol Biosyst. 2013 November; 9(11):2877-88. doi: 10.1039/c3mb70267g.
[0552] Malaney et al, 2017: PMID: 28289760. PTEN proteoforms in biology and disease. Cell Mol Life Sci. 2017 August; 74(15):2783-2794. doi: 10.1007/s00018-017-2500-6. Epub 2017 Mar. 13.
[0553] Masson et al, 2016: PMID: 26527737. The intrinsically disordered tails of PTEN and PTEN-L have distinct roles in regulating substrate specificity and membrane activity. Biochem J. 2016 Jan. 15; 473(2):135-44. doi: 10.1042/BJ20150931. Epub 2015 Nov. 2.
[0554] Merten et al, 2021: PMID: 34303832. Half-life extension of efficiently produced DARPin serum albumin fusions as a function of FcRn affinity and recycling. Eur J Pharm Biopharm. 2021 Jul. 22; 50939-6411(21)00198-3. doi: 10.1016/j.ejpb.2021.07.011. Online ahead of print.
[0555] Meuillet et al, 2004: PMID: 15313215. Thioredoxin-1 binds to the C2 domain of PTEN inhibiting PTEN's lipid phosphatase activity and membrane binding: a mechanism for the functional loss of PTEN's tumor suppressor activity. Arch Biochem Biophys. 2004 Sep. 15; 429(2):123-33.
[0556] Mingo et al, 2019: PMID: 30993208. Precise definition of PTEN C-terminal epitopes and its implications in clinical oncology. NPJ Precis Oncol. 2019 Apr. 15; 3:11. doi: 10.1038/s41698-019-0083-4. eCollection 2019.
[0557] Odriozola et al, 2007: PMID: 17565999. Regulation of PTEN activity by its carboxyl-terminal autoinhibitory domain. J Biol Chem. 2007 Aug. 10; 282(32):23306-15. Epub 2007 Jun. 12.
[0558] Prudova et al, 2010: PMID: 20305284. Multiplex N-terminome analysis of MMP-2 and MMP-9 substrate degradomes by iTRAQ-TAILS quantitative proteomics. Mol Cell Proteomics. 2010 May; 9(5):894-911. doi: 10.1074/mcp.M000050-MCP201. Epub 2010 Mar. 20.
[0559] Pulido et al, 2014: PMID: 24985344. A unified nomenclature and amino acid numbering for human PTEN. Sci Signal. 2014 Jul. 1; 7(332):pe15. doi: 10.1126/scisignal.2005560.
[0560] Pulido et al, 2019: PMID: 31501265. Precise Immunodetection of PTEN Protein in Human Neoplasia. Cold Spring Harb Perspect Med. 2019 Dec. 2; 9(12). pii: a036293. doi: 10.1101/cshperspect.a036293.
[0561] Rubartelli & Sitia R, 1991: PMID: 1889608. Interleukin 1 beta and thioredoxin are secreted through a novel pathway of secretion. Biochem Soc Trans. 1991 April; 19(2):255-9.
[0562] Rulle et al, 2018: PMID: 30240851. Computer-Based Intensity Measurement Assists Pathologists in Scoring Phosphatase and Tensin Homolog Immunohistochemistry-Clinical Associations in NSCLC Patients of the European Thoracic Oncology Platform Lungscape Cohort. J Thorac Oncol. 2018 December; 13(12):1851-1863. doi: 10.1016/j.jtho.2018.08.2034. Epub 2018 Sep. 18.
[0563] Russell et al, 2018: PMID: 30479334. PTEN expression by an oncolytic herpesvirus directs T-cell mediated tumor clearance. Nat Commun. 2018 Nov. 27; 9(1):5006. doi: 10.1038/s41467-018-07344-1.
[0564] Ryu et al, 2020: PMID: 32057052. Modular protein-DNA hybrid nanostructures as a drug delivery platform. Nanoscale. 2020 Feb. 14. doi: 10.1039/c9nr08519j. [Epub ahead of print].
[0565] Sak-Ubol et al, 2016: PMID: 27176608. Secretory production of a beta-mannanase and a chitosanase using a Lactobacillus plantarum expression system. Microb Cell Fact. 2016 May 12; 15:81. doi: 10.1186/s12934-016-0481-z. Sand et al, 2015: PMID: 25674083. Unraveling the Interaction between FcRn and Albumin: Opportunities for Design of Albumin-Based Therapeutics. Front Immunol. 2015 Jan. 26; 5:682. doi: 10.3389/fimmu.2014.00682. eCollection 2014.
[0566] Sangale et al, 2011: PMID: 20930614. A robust immunohistochemical assay for detecting PTEN expression in human tumors. Appl Immunohistochem Mol Morphol. 2011 March; 19(2):173-83. doi: 10.1097/PAI.0b013e3181f1da13. Schmidt et al, 2017: PMID: 28637874. Direct demonstration of a neonatal Fc receptor (FcRn)-driven endosomal sorting pathway for cellular recycling of albumin. J Biol Chem. 2017 Aug. 11; 292(32):13312-13322. doi: 10.1074/jbc.M117.794248. Epub 2017 Jun. 21.
[0567] Song et al, 2015: PMID: 26297993. Purification optimization for a recombinant single-chain variable fragment against type 1 insulin-like growth factor receptor (IGF-1R) by using design of experiment (DoE). Protein Expr Purif. 2015 December; 116:98-104. doi: 10.1016/j.pep.2015.08.020. Epub 2015 Aug. 20.
[0568] Spinelli & Leslie, 2015: PMID: 25461809. Assaying PTEN catalysis in vitro. Methods. 2015 May; 77-78:51-7. doi: 10.1016/j.ymeth.2014.11.003. Epub 2014 Nov. 13.
[0569] Strohl W R, 2015:PMID: 26177629. Fusion Proteins for Half-Life Extension of Biologics as a Strategy to Make Biobetters. BioDrugs. 2015 August; 29(4):215-39. doi: 10.1007/s40259-015-0133-6.
[0570] Sugawara et al, 2021: PMID: 32346610. Efficacy of a Third-Generation Oncolytic Herpes Virus G474 in Advanced Stage Models of Human Gastric Cancer. Mol Ther Oncolytics. 2020 Apr. 8; 17:205-215. doi: 10.1016/j.omto.2020.03.022. eCollection 2020 Jun. 26.
[0571] Susan-Resiga et al. 2011: PMID: 21550985. Furin is the major processing enzyme of the cardiac-specific growth factor bone morphogenetic protein 10. J Biol Chem. 2011 Jul. 1; 286(26):22785-94. doi: 10.1074/jbc.M111.233577. Epub 2011 May 5.
[0572] Suzuki et al, 2015: PMID: 25588742. Preferable sites and orientations of transgene inserted in the adenovirus vector genome: The E3 site may be unfavorable for transgene position. Gene Ther. 2015 May; 22(5):421-9. doi: 10.1038/gt.2014.124. Epub 2015 Jan. 15.
[0573] Swiercz et al, 2017: PMID: 27974681. Loss of expression of the recycling receptor, FcRn, promotes tumor cell growth by increasing albumin consumption. Oncotarget. 2017 Jan. 10; 8(2):3528-3541. doi: 10.18632/oncotarget.13869.
[0574] Tian et al, 2016: PMID: 21541042. FurinDB: A database of 20-residue furin cleavage site motifs, substrates and their associated drugs. Int J Mol Sci. 2011 Feb. 8; 12(2):1060-5.
[0575] Tzani et al, 2016: PMID: 27249819. Systematic analysis of the PTEN 5′ leader identifies a major AUU initiated proteoform. Open Biol. 2016 May; 6(5). pii: 150203. doi: 10.1098/rsob.150203. Epub 2016 May 25.
[0576] Vidak et al, 2019: PMID: 30897858. Cysteine Cathepsins and their Extracellular Roles: Shaping the Microenvironment. Cells. 2019 Mar. 20; 8(3). pii: E264. doi: 10.3390/cells8030264.
[0577] Wang et al, 2019: PMID: 30499341. Preclinical Safety Evaluation of Oncolytic Herpes Simplex Virus Type 2. Hum Gene Ther. 2019 May; 30(5):651-660. doi: 10.1089/hum.2018.170. Epub 2019 Jan. 16. DOI: 10.1089/hum.2018.170.
[0578] Wu et al, 2017: PMID: 28783500. Treatment with PTEN-Long protein inhibits hepatitis C virus replication. Virology. 2017 November; 511:1-8. doi: 10.1016/j.virol.2017.08.002. Epub 2017 Aug. 4.
[0579] Zhang et al, 2021: PMID: 33837053. Intratumoral OH2, an oncolytic herpes simplex virus 2, in patients with advanced solid tumors: a multicenter, phase I/II clinical trial. J Immunother Cancer. 2021 April; 9(4):e002224. PMC8043042. doi: 10.1136/jitc-2020-002224.
[0580] Zhao et al, 2013: PMID: 23951172. In vivo monitoring of angiogenesis inhibition via down-regulation of mir-21 in a VEGFR2-luc murine breast cancer model using bioluminescent imaging. PLoS One. 2013 Aug. 8; 8(8):e71472. doi: 10.1371/journal.pone.0071472. eCollection 2013.
[0581] Zhao et al, 2014: PMID: 24671154. A novel oncolytic herpes simplex virus type 2 has potent anti-tumor activity. PLoS One. 2014 Mar. 26; 9(3):e93103. doi: 10.1371/journal.pone.0093103. eCollection 2014.
[0582] Zhong et al, 2020: PMID: 31898484. Comparison of the molecular and cellular phenotypes of common mouse syngeneic models with human tumors. BMC Genomics 2020 Jan. 2;21(1):2. doi: 10.1186/s12864-019-6344-3. PMC6941261 DOI: 10.1186/s12864-019-6344-3.
[0583] Zhu et al, 2015: PMID: 26078940. Molecular Analysis of AFP and HSA Interactions with PTEN Protein. Biomed Res Int. 2015; 2015:256916. doi: 10.1155/2015/256916. Epub 2015 May 20.

LENGTHY TABLES
The patent application contains a lengthy table section. A copy of the table is available in electronic form from the USPTO web site (https://seqdata.uspto.gov/?pageRequest=docDetail&DocID=US20230295268A1). An electronic copy of the table will also be available from the USPTO upon request and payment of the fee set forth in 37 CFR 1.19(b)(3).

The application's sequence listing, which the Patent Office published only in electronic form, follows.

SEQUENCE LISTING (249 sequences)

SEQ ID NO: 1 - protein, 576 aa, Homo sapiens
LERGGEAAAAAAAAAAAPGRGSESPVTISRAGNAGELVSPLLLPPTRRRRRRHIQGPGPVLNLPSAAAAPPVARAPEAAGGGSRSEDYSSSPHSAAAAARPLAAEEKQAQSLQPSSSRRSSHYPAAVQSQAAAERGASATAKSRAISILQKKPRHQQLLPSLSSFFFSHRLPDMTAIIKEIVSRNKRRYQEDGFDLDLTYIYPNIIAMGFPAERLEGVYRNNIDDVVRFLDSKHKNHYKIYNLCAERHYDTAKFNCRVAQYPFEDHNPPQLELIKPFCEDLDQWLSEDDNHVAAIHCKAGKGRTGVMICAYLLHRGKFLKAQEALDFYGEVRTRDKKGVTIPSQRRYVYYYSYLLKNHLDYRPVALLFHKMMFETIPMFSGGTCNPQFVVCQLKVKIYSSNSGPTRREDKFMYFEFPQPLPVCGDIKVEFFHKQNKMLKKDKMFHFWVNTFFIPGPEETSEKVENGSLCDQEIDSICSIERADNDKEYLVLTLTKNDLDKANKDKANRYFSPNFKVKLYFTKTVEEPSNPEASSSTSVTPDVSDNEPDHYRYSDTTDSDPENEPFDEDQHTQITKV

SEQ ID NO: 2 - protein, 403 aa, Homo sapiens [sequence omitted]

SEQ ID NO: 3 - protein, 555 aa, Homo sapiens
SESPVTISRAGNAGELVSPLLLPPTRRRRRRHIQGPGPVLNLPSAAAAPPVARAPEAAGGGSRSEDYSSSPHSAAAAARPLAAEEKQAQSLQPSSSRRSSHYPAAVQSQAAAERGASATAKSRAISILQKKPRHQQLLPSLSSFFFSHRLPDMTAIIKEIVSRNKRRYQEDGFDLDLTYIYPNIIAMGFPAERLEGVYRNNIDDVVRFLDSKHKNHYKIYNLCAERHYDTAKFNCRVAQYPFEDHNPPQLELIKPFCEDLDQWLSEDDNHVAAIHCKAGKGRTGVMICAYLLHRGKFLKAQEALDFYGEVRTRDKKGVTIPSQRRYVYYYSYLLKNHLDYRPVALLFHKMMFETIPMFSGGTCNPQFVVCQLKVKIYSSNSGPTRREDKFMYFEFPQPLPVCGDIKVEFFHKQNKMLKKDKMFHFWVNTFFIPGPEETSEKVENGSLCDQEIDSICSIERADNDKEYLVLTLTKNDLDKANKDKANRYFSPNFKVKLYFTKTVEEPSNPEASSSTSVTPDVSDNEPDHYRYSDTTDSDPENEPFDEDQHTQITKV

SEQ ID NO: 4 - protein, 21 aa, Homo sapiens
LERGGEAAAAAAAAAAAPGRG

SEQ ID NO: 5 - protein, 152 aa, Homo sapiens
SESPVTISRAGNAGELVSPLLLPPTRRRRRRHIQGPGPVLNLPSAAAAPPVARAPEAAGGGSRSEDYSSSPHSAAAAARPLAAEEKQAQSLQPSSSRRSSHYPAAVQSQAAAERGASATAKSRAISILQKKPRHQQLLPSLSSFFFSHRLPD

SEQ ID NO: 6 - protein, 549 aa, Homo sapiens
ISRAGNAGELVSPLLLPPTRRRRRRHIQGPGPVLNLPSAAAAPPVARAPEAAGGGSRSEDYSSSPHSAAAAARPLAAEEKQAQSLQPSSSRRSSHYPAAVQSQAAAERGASATAKSRAISILQKKPRHQQLLPSLSSFFFSHRLPDMTAIIKEIVSRNKRRYQEDGFDLDLTYIYPNIIAMGFPAERLEGVYRNNIDDVVRFLDSKHKNHYKIYNLCAERHYDTAKFNCRVAQYPFEDHNPPQLELIKPFCEDLDQWLSEDDNHVAAIHCKAGKGRTGVMICAYLLHRGKFLKAQEALDFYGEVRTRDKKGVTIPSQRRYVYYYSYLLKNHLDYRPVALLFHKMMFETIPMFSGGTCNPQFVVCQLKVKIYSSNSGPTRREDKFMYFEFPQPLPVCGDIKVEFFHKQNKMLKKDKMFHFWVNTFFIPGPEETSEKVENGSLCDQEIDSICSIERADNDKEYLVLTLTKNDLDKANKDKANRYFSPNFKVKLYFTKTVEEPSNPEASSSTSVTPDVSDNEPDHYRYSDTTDSDPENEPFDEDQHTQITKV

SEQ ID NO: 7 - protein, 534 aa, Homo sapiens
LPPTRRRRRRHIQGPGPVLNLPSAAAAPPVARAPEAAGGGSRSEDYSSSPHSAAAAARPLAAEEKQAQSLQPSSSRRSSHYPAAVQSQAAAERGASATAKSRAISILQKKPRHQQLLPSLSSFFFSHRLPDMTAIIKEIVSRNKRRYQEDGFDLDLTYIYPNIIAMGFPAERLEGVYRNNIDDVVRFLDSKHKNHYKIYNLCAERHYDTAKFNCRVAQYPFEDHNPPQLELIKPFCEDLDQWLSEDDNHVAAIHCKAGKGRTGVMICAYLLHRGKFLKAQEALDFYGEVRTRDKKGVTIPSQRRYVYYYSYLLKNHLDYRPVALLFHKMMFETIPMFSGGTCNPQFVVCQLKVKIYSSNSGPTRREDKFMYFEFPQPLPVCGDIKVEFFHKQNKMLKKDKMFHFWVNTFFIPGPEETSEKVENGSLCDQEIDSICSIERADNDKEYLVLTLTKNDLDKANKDKANRYFSPNFKVKLYFTKTVEEPSNPEASSSTSVTPDVSDNEPDHYRYSDTTDSDPENEPFDEDQHTQITKV

SEQ ID NO: 8 - protein, 475 aa, Homo sapiens
LAAEEKQAQSLQPSSSRRSSHYPAAVQSQAAAERGASATAKSRAISILQKKPRHQQLLPSLSSFFFSHRLPDMTAIIKEIVSRNKRRYQEDGFDLDLTYIYPNIIAMGFPAERLEGVYRNNIDDVVRFLDSKHKNHYKIYNLCAERHYDTAKFNCRVAQYPFEDHNPPQLELIKPFCEDLDQWLSEDDNHVAAIHCKAGKGRTGVMICAYLLHRGKFLKAQEALDFYGEVRTRDKKGVTIPSQRRYVYYYSYLLKNHLDYRPVALLFHKMMFETIPMFSGGTCNPQFVVCQLKVKIYSSNSGPTRREDKFMYFEFPQPLPVCGDIKVEFFHKQNKMLKKDKMFHFWVNTFFIPGPEETSEKVENGSLCDQEIDSICSIERADNDKEYLVLTLTKNDLDKANKDKANRYFSPNFKVKLYFTKTVEEPSNPEASSSTSVTPDVSDNEPDHYRYSDTTDSDPENEPFDEDQHTQITKV

SEQ ID NO: 9 - protein, 146 aa, Homo sapiens
ISRAGNAGELVSPLLLPPTRRRRRRHIQGPGPVLNLPSAAAAPPVARAPEAAGGGSRSEDYSSSPHSAAAAARPLAAEEKQAQSLQPSSSRRSSHYPAAVQSQAAAERGASATAKSRAISILQKKPRHQQLLPSLSSFFFSHRLPD

SEQ ID NO: 10 - protein, 131 aa, Homo sapiens
LPPTRRRRRRHIQGPGPVLNLPSAAAAPPVARAPEAAGGGSRSEDYSSSPHSAAAAARPLAAEEKQAQSLQPSSSRRSSHYPAAVQSQAAAERGASATAKSRAISILQKKPRHQQLLPSLSSFFFSHRLPD

SEQ ID NO: 11 - protein, 72 aa, Homo sapiens
LAAEEKQAQSLQPSSSRRSSHYPAAVQSQAAAERGASATAKSRAISILQKKPRHQQLLPSLSSFFFSHRLPD

SEQ ID NO: 12 - protein, 609 aa, Homo sapiens [sequence omitted]

SEQ ID NO: 13 - protein, 585 aa, Homo sapiens [sequence omitted]

SEQ ID NO: 14 - protein, 1177 aa, synthetic construct
MKWVTFISLLFLFSSAYSRGVFRRDAHKSEVAHRFKDLGEENFKALVLIAFAQYLQQCPFEDHVKLVNEVTEFAKTCVADESAENCDKSLHTLFGDKLCTVATLRETYGEMADCCAKQEPERNECFLQHKDDNPNLPRLVRPEVDVMCTAFHDNEETFLKKYLYEIARRHPYFYAPELLFFAKRYKAAFTECCQAADKAACLLPKLDELRDEGKASSAKQRLKCASLQKFGERAFKAWAVARLSQRFPKAEFAEVSKLVTDLTKVHTECCHGDLLECADDRADLAKYICENQDSISSKLKECCEKPLLEKSHCIAEVENDEMPADLPSLAADFVESKDVCKNYAEAKDVFLGMFLYEYARRHPDYSVVLLLRLAKTYETTLEKCCAAADPHECYAKVFDEFKPLVEEPQNLIKQNCELFEQLGEYKFQNALLVRYTKKVPQVSTPTLVEVSRNLGKVGSKCCKHPEAKRMPCAEDYLSVVLNQLCVLHEKTPVSDRVTKCCTESLVNRRPCFSALEVDETYVPKEFNAETFTFHADICTLSEKERQIKKQTALVELVKHKPKATKEQLKAVMDDFAAFVEKCCKADDKETCFAEEGKKLVAASQAALGLTNRRKKRALDAAYISRAGNAGELVSPLLLPPTRRRRRRHIQGPGPVLNLPSAAAAPPVARAPEAAGGGSRSEDYSSSPHSAAAAARPLAAEEKQAQSLQPSSSRRSSHYPAAVQSQAAAERGASATAKSRAISILQKKPRHQQLLPSLSSFFFSHRLPDMTAIIKEIVSRNKRRYQEDGFDLDLTYIYPNIIAMGFPAERLEGVYRNNIDDVVRFLDSKHKNHYKIYNLCAERHYDTAKFNCRVAQYPFEDHNPPQLELIKPFCEDLDQWLSEDDNHVAAIHCKAGKGRTGVMICAYLLHRGKFLKAQEALDFYGEVRTRDKKGVTIPSQRRYVYYYSYLLKNHLDYRPVALLFHKMMFETIPMFSGGTCNPQFVVCQLKVKIYSSNSGPTRREDKFMYFEFPQPLPVCGDIKVEFFHKQNKMLKKDKMFHFWVNTFFIPGPEETSEKVENGSLCDQEIDSICSIERADNDKEYLVLTLTKNDLDKANKDKANRYFSPNFKVKLYFTKTVEEPSNPEASSSTSVTPDVSDNEPDHYRYSDTTDSDPENEPFDEDQHTQITKVHHHHHH

SEQ ID NO: 15 - protein, 1172 aa, synthetic construct
MKWVTFISLLFLFSSAYSRGVFRRDAHKSEVAHRFKDLGEENFKALVLIAFAQYLQQCPFEDHVKLVNEVTEFAKTCVADESAENCDKSLHTLFGDKLCTVATLRETYGEMADCCAKQEPERNECFLQHKDDNPNLPRLVRPEVDVMCTAFHDNEETFLKKYLYEIARRHPYFYAPELLFFAKRYKAAFTECCQAADKAACLLPKLDELRDEGKASSAKQRLKCASLQKFGERAFKAWAVARLSQRFPKAEFAEVSKLVTDLTKVHTECCHGDLLECADDRADLAKYICENQDSISSKLKECCEKPLLEKSHCIAEVENDEMPADLPSLAADFVESKDVCKNYAEAKDVFLGMFLYEYARRHPDYSVVLLLRLAKTYETTLEKCCAAADPHECYAKVFDEFKPLVEEPQNLIKQNCELFEQLGEYKFQNALLVRYTKKVPQVSTPTLVEVSRNLGKVGSKCCKHPEAKRMPCAEDYLSVVLNQLCVLHEKTPVSDRVTKCCTESLVNRRPCFSALEVDETYVPKEFNAETFTFHADICTLSEKERQIKKQTALVELVKHKPKATKEQLKAVMDDFAAFVEKCCKADDKETCFAEEGKKLVAASQAALGLGPAALKAAISRAGNAGELVSPLLLPPTRRRRRRHIQGPGPVLNLPSAAAAPPVARAPEAAGGGSRSEDYSSSPHSAAAAARPLAAEEKQAQSLQPSSSRRSSHYPAAVQSQAAAERGASATAKSRAISILQKKPRHQQLLPSLSSFFFSHRLPDMTAIIKEIVSRNKRRYQEDGFDLDLTYIYPNIIAMGFPAERLEGVYRNNIDDVVRFLDSKHKNHYKIYNLCAERHYDTAKFNCRVAQYPFEDHNPPQLELIKPFCEDLDQWLSEDDNHVAAIHCKAGKGRTGVMICAYLLHRGKFLKAQEALDFYGEVRTRDKKGVTIPSQRRYVYYYSYLLKNHLDYRPVALLFHKMMFETIPMFSGGTCNPQFVVCQLKVKIYSSNSGPTRREDKFMYFEFPQPLPVCGDIKVEFFHKQNKMLKKDKMFHFWVNTFFIPGPEETSEKVENGSLCDQEIDSICSIERADNDKEYLVLTLTKNDLDKANKDKANRYFSPNFKVKLYFTKTVEEPSNPEASSSTSVTPDVSDNEPDHYRYSDTTDSDPENEPFDEDQHTQITKVHHHHHH

SEQ ID NO: 16 - protein, 1164 aa, synthetic construct
MKWVTFISLLFLFSSAYSRGVFRRDAHKSEVAHRFKDLGEENFKALVLIAFAQYLQQCPFEDHVKLVNEVTEFAKTCVADESAENCDKSLHTLFGDKLCTVATLRETYGEMADCCAKQEPERNECFLQHKDDNPNLPRLVRPEVDVMCTAFHDNEETFLKKYLYEIARRHPYFYAPELLFFAKRYKAAFTECCQAADKAACLLPKLDELRDEGKASSAKQRLKCASLQKFGERAFKAWAVARLSQRFPKAEFAEVSKLVTDLTKVHTECCHGDLLECADDRADLAKYICENQDSISSKLKECCEKPLLEKSHCIAEVENDEMPADLPSLAADFVESKDVCKNYAEAKDVFLGMFLYEYARRHPDYSVVLLLRLAKTYETTLEKCCAAADPHECYAKVFDEFKPLVEEPQNLIKQNCELFEQLGEYKFQNALLVRYTKKVPQVSTPTLVEVSRNLGKVGSKCCKHPEAKRMPCAEDYLSVVLNQLCVLHEKTPVSDRVTKCCTESLVNRRPCFSALEVDETYVPKEFNAETFTFHADICTLSEKERQIKKQTALVELVKHKPKATKEQLKAVMDDFAAFVEKCCKADDKETCFAEEGKKLVAASQAALGLISRAGNAGELVSPLLLPPTRRRRRRHIQGPGPVLNLPSAAAAPPVARAPEAAGGGSRSEDYSSSPHSAAAAARPLAAEEKQAQSLQPSSSRRSSHYPAAVQSQAAAERGASATAKSRAISILQKKPRHQQLLPSLSSFFFSHRLPDMTAIIKEIVSRNKRRYQEDGFDLDLTYIYPNIIAMGFPAERLEGVYRNNIDDVVRFLDSKHKNHYKIYNLCAERHYDTAKFNCRVAQYPFEDHNPPQLELIKPFCEDLDQWLSEDDNHVAAIHCKAGKGRTGVMICAYLLHRGKFLKAQEALDFYGEVRTRDKKGVTIPSQRRYVYYYSYLLKNHLDYRPVALLFHKMMFETIPMFSGGTCNPQFVVCQLKVKIYSSNSGPTRREDKFMYFEFPQPLPVCGDIKVEFFHKQNKMLKKDKMFHFWVNTFFIPGPEETSEKVENGSLCDQEIDSICSIERADNDKEYLVLTLTKNDLDKANKDKANRYFSPNFKVKLYFTKTVEEPSNPEASSSTSVTPDVSDNEPDHYRYSDTTDSDPENEPFDEDQHTQITKVHHHHHH

SEQ ID NO: 17 - protein, 1185 aa, synthetic construct
MKWVTFISLLFLFSSAYSRGVFRRDAHKSEVAHRFKDLGEENFKALVLIAFAQYLQQCPFEDHVKLVNEVTEFAKTCVADESAENCDKSLHTLFGDKLCTVATLRETYGEMADCCAKQEPERNECFLQHKDDNPNLPRLVRPEVDVMCTAFHDNEETFLKKYLYEIARRHPYFYAPELLFFAKRYKAAFTECCQAADKAACLLPKLDELRDEGKASSAKQRLKCASLQKFGERAFKAWAVARLSQRFPKAEFAEVSKLVTDLTKVHTECCHGDLLECADDRADLAKYICENQDSISSKLKECCEKPLLEKSHCIAEVENDEMPADLPSLAADFVESKDVCKNYAEAKDVFLGMFLYEYARRHPDYSVVLLLRLAKTYETTLEKCCAAADPHECYAKVFDEFKPLVEEPQNLIKQNCELFEQLGEYKFQNALLVRYTKKVPQVSTPTLVEVSRNLGKVGSKCCKHPEAKRMPCAEDYLSVVLNQLCVLHEKTPVSDRVTKCCTESLVNRRPCFSALEVDETYVPKEFNAETFTFHADICTLSEKERQIKKQTALVELVKHKPKATKEQLKAVMDDFAAFVEKCCKADDKETCFAEEGKKLVAASQAALGLGPAALKAATNRRKKRALDAAYISRAGNAGELVSPLLLPPTRRRRRRHIQGPGPVLNLPSAAAAPPVARAPEAAGGGSRSEDYSSSPHSAAAAARPLAAEEKQAQSLQPSSSRRSSHYPAAVQSQAAAERGASATAKSRAISILQKKPRHQQLLPSLSSFFFSHRLPDMTAIIKEIVSRNKRRYQEDGFDLDLTYIYPNIIAMGFPAERLEGVYRNNIDDVVRFLDSKHKNHYKIYNLCAERHYDTAKFNCRVAQYPFEDHNPPQLELIKPFCEDLDQWLSEDDNHVAAIHCKAGKGRTGVMICAYLLHRGKFLKAQEALDFYGEVRTRDKKGVTIPSQRRYVYYYSYLLKNHLDYRPVALLFHKMMFETIPMFSGGTCNPQFVVCQLKVKIYSSNSGPTRREDKFMYFEFPQPLPVCGDIKVEFFHKQNKMLKKDKMFHFWVNTFFIPGPEETSEKVENGSLCDQEIDSICSIERADNDKEYLVLTLTKNDLDKANKDKANRYFSPNFKVKLYFTKTVEEPSNPEASSSTSVTPDVSDNEPDHYRYSDTTDSDPENEPFDEDQHTQITKVHHHHHH

SEQ ID NO: 18 - protein, 1022 aa, synthetic construct
MKWVTFISLLFLFSSAYSRGVFRRDAHKSEVAHRFKDLGEENFKALVLIAFAQYLQQCPFEDHVKLVNEVTEFAKTCVADESAENCDKSLHTLFGDKLCTVATLRETYGEMADCCAKQEPERNECFLQHKDDNPNLPRLVRPEVDVMCTAFHDNEETFLKKYLYEIARRHPYFYAPELLFFAKRYKAAFTECCQAADKAACLLPKLDELRDEGKASSAKQRLKCASLQKFGERAFKAWAVARLSQRFPKAEFAEVSKLVTDLTKVHTECCHGDLLECADDRADLAKYICENQDSISSKLKECCEKPLLEKSHCIAEVENDEMPADLPSLAADFVESKDVCKNYAEAKDVFLGMFLYEYARRHPDYSVVLLLRLAKTYETTLEKCCAAADPHECYAKVFDEFKPLVEEPQNLIKQNCELFEQLGEYKFQNALLVRYTKKVPQVSTPTLVEVSRNLGKVGSKCCKHPEAKRMPCAEDYLSVVLNQLCVLHEKTPVSDRVTKCCTESLVNRRPCFSALEVDETYVPKEFNAETFTFHADICTLSEKERQIKKQTALVELVKHKPKATKEQLKAVMDDFAAFVEKCCKADDKETCFAEEGKKLVAASQAALGLMTAIIKEIVSRNKRRYQEDGFDLDLTYIYPNIIAMGFPAERLEGVYRNNIDDVVRFLDSKHKNHYKIYNLCAERHYDTAKFNCRVAQYPFEDHNPPQLELIKPFCEDLDQWLSEDDNHVAAIHCKAGKGRTGVMICAYLLHRGKFLKAQEALDFYGEVRTRDKKGVTIPSQRRYVYYYSYLLKNHLDYRPVALLFHKMMFETIPMFSGGTCNPQFVVCQLKVKIYSSNSGPTRREDKFMYFEFPQPLPVCGDIKVEFFHKQNKMLKKDKMFHFWVNTFFIPGPEETSEKVENGSLCDQEIDSICSIERADNDKEYLVLTLTKNDLDKANKDKANRYFSPNFKVKLYFTKTVEEPSNPEASSSTSVTPDVSDNEPDHYRYSDTTDSDPENEPFDEDQHTQITKVYPYDVPDYAC

SEQ ID NO: 19 - protein, 1018 aa, synthetic construct
MKWVTFISLLFLFSSAYSRGVFRRDAHKSEVAHRFKDLGEENFKALVLIAFAQYLQQCPFEDHVKLVNEVTEFAKTCVADESAENCDKSLHTLFGDKLCTVATLRETYGEMADCCAKQEPERNECFLQHKDDNPNLPRLVRPEVDVMCTAFHDNEETFLKKYLYEIARRHPYFYAPELLFFAKRYKAAFTECCQAADKAACLLPKLDELRDEGKASSAKQRLKCASLQKFGERAFKAWAVARLSQRFPKAEFAEVSKLVTDLTKVHTECCHGDLLECADDRADLAKYICENQDSISSKLKECCEKPLLEKSHCIAEVENDEMPADLPSLAADFVESKDVCKNYAEAKDVFLGMFLYEYARRHPDYSVVLLLRLAKTYETTLEKCCAAADPHECYAKVFDEFKPLVEEPQNLIKQNCELFEQLGEYKFQNALLVRYTKKVPQVSTPTLVEVSRNLGKVGSKCCKHPEAKRMPCAEDYLSVVLNQLCVLHEKTPVSDRVTKCCTESLVNRRPCFSALEVDETYVPKEFNAETFTFHADICTLSEKERQIKKQTALVELVKHKPKATKEQLKAVMDDFAAFVEKCCKADDKETCFAEEGKKLVAASQAALGLMTAIIKEIVSRNKRRYQEDGFDLDLTYIYPNIIAMGFPAERLEGVYRNNIDDVVRFLDSKHKNHYKIYNLCAERHYDTAKFNCRVAQYPFEDHNPPQLELIKPFCEDLDQWLSEDDNHVAAIHCKAGKGRTGVMICAYLLHRGKFLKAQEALDFYGEVRTRDKKGVTIPSQRRYVYYYSYLLKNHLDYRPVALLFHKMMFETIPMFSGGTCNPQFVVCQLKVKIYSSNSGPTRREDKFMYFEFPQPLPVCGDIKVEFFHKQNKMLKKDKMFHFWVNTFFIPGPEETSEKVENGSLCDQEIDSICSIERADNDKEYLVLTLTKNDLDKANKDKANRYFSPNFKVKLYFTKTVEEPSNPEASSSTSVTPDVSDNEPDHYRYSDTTDSDPENEPFDEDQHTQITKVHHHHHH

SEQ ID NO: 20 - protein, 1031 aa, synthetic construct
MKWVTFISLLFLFSSAYSRGVFRRDAHKSEVAHRFKDLGEENFKALVLIAFAQYLQQCPFEDHVKLVNEVTEFAKTCVADESAENCDKSLHTLFGDKLCTVATLRETYGEMADCCAKQEPERNECFLQHKDDNPNLPRLVRPEVDVMCTAFHDNEETFLKKYLYEIARRHPYFYAPELLFFAKRYKAAFTECCQAADKAACLLPKLDELRDEGKASSAKQRLKCASLQKFGERAFKAWAVARLSQRFPKAEFAEVSKLVTDLTKVHTECCHGDLLECADDRADLAKYICENQDSISSKLKECCEKPLLEKSHCIAEVENDEMPADLPSLAADFVESKDVCKNYAEAKDVFLGMFLYEYARRHPDYSVVLLLRLAKTYETTLEKCCAAADPHECYAKVFDEFKPLVEEPQNLIKQNCELFEQLGEYKFQNALLVRYTKKVPQVSTPTLVEVSRNLGKVGSKCCKHPEAKRMPCAEDYLSVVLNQLCVLHEKTPVSDRVTKCCTESLVNRRPCFSALEVDETYVPKEFNAETFTFHADICTLSEKERQIKKQTALVELVKHKPKATKEQLKAVMDDFAAFVEKCCKADDKETCFAEEGKKLVAASQAALGLTNRRKKRALDAAYMTAIIKEIVSRNKRRYQEDGFDLDLTYIYPNIIAMGFPAERLEGVYRNNIDDVVRFLDSKHKNHYKIYNLCAERHYDTAKFNCRVAQYPFEDHNPPQLELIKPFCEDLDQWLSEDDNHVAAIHCKAGKGRTGVMICAYLLHRGKFLKAQEALDFYGEVRTRDKKGVTIPSQRRYVYYYSYLLKNHLDYRPVALLFHKMMFETIPMFSGGTCNPQFVVCQLKVKIYSSNSGPTRREDKFMYFEFPQPLPVCGDIKVEFFHKQNKMLKKDKMFHFWVNTFFIPGPEETSEKVENGSLCDQEIDSICSIERADNDKEYLVLTLTKNDLDKANKDKANRYFSPNFKVKLYFTKTVEEPSNPEASSSTSVTPDVSDNEPDHYRYSDTTDSDPENEPFDEDQHTQITKVHHHHHH

SEQ ID NO: 21 - protein, 1057 aa, synthetic construct
MKWVTFISLLFLFSSAYSRGVFRRDAHKSEVAHRFKDLGEENFKALVLIAFAQYLQQCPFEDHVKLVNEVTEFAKTCVADESAENCDKSLHTLFGDKLCTVATLRETYGEMADCCAKQEPERNECFLQHKDDNPNLPRLVRPEVDVMCTAFHDNEETFLKKYLYEIARRHPYFYAPELLFFAKRYKAAFTECCQAADKAACLLPKLDELRDEGKASSAKQRLKCASLQKFGERAFKAWAVARLSQRFPKAEFAEVSKLVTDLTKVHTECCHGDLLECADDRADLAKYICENQDSISSKLKECCEKPLLEKSHCIAEVENDEMPADLPSLAADFVESKDVCKNYAEAKDVFLGMFLYEYARRHPDYSVVLLLRLAKTYETTLEKCCAAADPHECYAKVFDEFKPLVEEPQNLIKQNCELFEQLGEYKFQNALLVRYTKKVPQVSTPTLVEVSRNLGKVGSKCCKHPEAKRMPCAEDYLSVVLNQLCVLHEKTPVSDRVTKCCTESLVNRRPCFSALEVDETYVPKEFNAETFTFHADICTLSEKERQIKKQTALVELVKHKPKATKEQLKAVMDDFAAFVEKCCKADDKETCFAEEGKKLVAASQAALGLPPTRRRRRRHIQGPGPKKPRHQQLLPSLSSFFFSHRLPDMTAIIKEIVSRNKRRYQEDGFDLDLTYIYPNIIAMGFPAERLEGVYRNNIDDVVRFLDSKHKNHYKIYNLCAERHYDTAKFNCRVAQYPFEDHNPPQLELIKPFCEDLDQWLSEDDNHVAAIHCKAGKGRTGVMICAYLLHRGKFLKAQEALDFYGEVRTRDKKGVTIPSQRRYVYYYSYLLKNHLDYRPVALLFHKMMFETIPMFSGGTCNPQFVVCQLKVKIYSSNSGPTRREDKFMYFEFPQPLPVCGDIKVEFFHKQNKMLKKDKMFHFWVNTFFIPGPEETSEKVENGSLCDQEIDSICSIERADNDKEYLVLTLTKNDLDKANKDKANRYFSPNFKVKLYFTKTVEEPSNPEASSSTSVTPDVSDNEPDHYRYSDTTDSDPENEPFDEDQHTQITKVHHHHHH

SEQ ID NO: 22 - protein, 1070 aa, synthetic construct
MKWVTFISLLFLFSSAYSRGVFRRDAHKSEVAHRFKDLGEENFKALVLIAFAQYLQQCPFEDHVKLVNEVTEFAKTCVADESAENCDKSLHTLFGDKLCTVATLRETYGEMADCCAKQEPERNECFLQHKDDNPNLPRLVRPEVDVMCTAFHDNEETFLKKYLYEIARRHPYFYAPELLFFAKRYKAAFTECCQAADKAACLLPKLDELRDEGKASSAKQRLKCASLQKFGERAFKAWAVARLSQRFPKAEFAEVSKLVTDLTKVHTECCHGDLLECADDRADLAKYICENQDSISSKLKECCEKPLLEKSHCIAEVENDEMPADLPSLAADFVESKDVCKNYAEAKDVFLGMFLYEYARRHPDYSVVLLLRLAKTYETTLEKCCAAADPHECYAKVFDEFKPLVEEPQNLIKQNCELFEQLGEYKFQNALLVRYTKKVPQVSTPTLVEVSRNLGKVGSKCCKHPEAKRMPCAEDYLSVVLNQLCVLHEKTPVSDRVTKCCTESLVNRRPCFSALEVDETYVPKEFNAETFTFHADICTLSEKERQIKKQTALVELVKHKPKATKEQLKAVMDDFAAFVEKCCKADDKETCFAEEGKKLVAASQAALGLTNRRKKRALDAAYPPTRRRRRRHIQGPGPKKPRHQQLLPSLSSFFFSHRLPDMTAIIKEIVSRNKRRYQEDGFDLDLTYIYPNIIAMGFPAERLEGVYRNNIDDVVRFLDSKHKNHYKIYNLCAERHYDTAKFNCRVAQYPFEDHNPPQLELIKPFCEDLDQWLSEDDNHVAAIHCKAGKGRTGVMICAYLLHRGKFLKAQEALDFYGEVRTRDKKGVTIPSQRRYVYYYSYLLKNHLDYRPVALLFHKMMFETIPMFSGGTCNPQFVVCQLKVKIYSSNSGPTRREDKFMYFEFPQPLPVCGDIKVEFFHKQNKMLKKDKMFHFWVNTFFIPGPEETSEKVENGSLCDQEIDSICSIERADNDKEYLVLTLTKNDLDKANKDKANRYFSPNFKVKLYFTKTVEEPSNPEASSSTSVTPDVSDNEPDHYRYSDTTDSDPENEPFDEDQHTQITKVHHHHHH

SEQ ID NO: 23 - protein, 1055 aa, synthetic construct
MKWVTFISLLFLFSSAYSRGVFRRDAHKSEVAHRFKDLGEENFKALVLIAFAQYLQQCPFEDHVKLVNEVTEFAKTCVADESAENCDKSLHTLFGDKLCTVATLRETYGEMADCCAKQEPERNECFLQHKDDNPNLPRLVRPEVDVMCTAFHDNEETFLKKYLYEIARRHPYFYAPELLFFAKRYKAAFTECCQAADKAACLLPKLDELRDEGKASSAKQRLKCASLQKFGERAFKAWAVARLSQRFPKAEFAEVSKLVTDLTKVHTECCHGDLLECADDRADLAKYICENQDSISSKLKECCEKPLLEKSHCIAEVENDEMPADLPSLAADFVESKDVCKNYAEAKDVFLGMFLYEYARRHPDYSVVLLLRLAKTYETTLEKCCAAADPHECYAKVFDEFKPLVEEPQNLIKQNCELFEQLGEYKFQNALLVRYTKKVPQVSTPTLVEVSRNLGKVGSKCCKHPEAKRMPCAEDYLSVVLNQLCVLHEKTPVSDRVTKCCTESLVNRRPCFSALEVDETYVPKEFNAETFTFHADICTLSEKERQIKKQTALVELVKHKPKATKEQLKAVMDDFAAFVEKCCKADDKETCFAEEGKKLVAASQAALGLLPPTRRRRRRHIQGPGPVLNLPSAAAAPPVARAPEAAMTAIIKEIVSRNKRRYQEDGFDLDLTYIYPNIIAMGFPAERLEGVYRNNIDDVVRFLDSKHKNHYKIYNLCAERHYDTAKFNCRVAQYPFEDHNPPQLELIKPFCEDLDQWLSEDDNHVAAIHCKAGKGRTGVMICAYLLHRGKFLKAQEALDFYGEVRTRDKKGVTIPSQRRYVYYYSYLLKNHLDYRPVALLFHKMMFETIPMFSGGTCNPQFVVCQLKVKIYSSNSGPTRREDKFMYFEFPQPLPVCGDIKVEFFHKQNKMLKKDKMFHFWVNTFFIPGPEETSEKVENGSLCDQEIDSICSIERADNDKEYLVLTLTKNDLDKANKDKANRYFSPNFKVKLYFTKTVEEPSNPEASSSTSVTPDVSDNEPDHYRYSDTTDSDPENEPFDEDQHTQITKVHHHHHH

SEQ ID NO: 24 - protein, 1059 aa, synthetic construct
MKWVTFISLLFLFSSAYSRGVFRRDAHKSEVAHRFKDLGEENFKALVLIAFAQYLQQCPFEDHVKLVNEVTEFAKTCVADESAENCDKSLHTLFGDKLCTVATLRETYGEMADCCAKQEPERNECFLQHKDDNPNLPRLVRPEVDVMCTAFHDNEETFLKKYLYEIARRHPYFYAPELLFFAKRYKAAFTECCQAADKAACLLPKLDELRDEGKASSAKQRLKCASLQKFGERAFKAWAVARLSQRFPKAEFAEVSKLVTDLTKVHTECCHGDLLECADDRADLAKYICENQDSISSKLKECCEKPLLEKSHCIAEVENDEMPADLPSLAADFVESKDVCKNYAEAKDVFLGMFLYEYARRHPDYSVVLLLRLAKTYETTLEKCCAAADPHECYAKVFDEFKPLVEEPQNLIKQNCELFEQLGEYKFQNALLVRYTKKVPQVSTPTLVEVSRNLGKVGSKCCKHPEAKRMPCAEDYLSVVLNQLCVLHEKTPVSDRVTKCCTESLVNRRPCFSALEVDETYVPKEFNAETFTFHADICTLSEKERQIKKQTALVELVKHKPKATKEQLKAVMDDFAAFVEKCCKADDKETCFAEEGKKLVAASQAALGLGGGSRSEDYSSSPHSAAAAARPLAAEEKQAQSLQPSSSRRSMTAIIKEIVSRNKRRYQEDGFDLDLTYIYPNIIAMGFPAERLEGVYRNNIDDVVRFLDSKHKNHYKIYNLCAERHYDTAKFNCRVAQYPFEDHNPPQLELIKPFCEDLDQWLSEDDNHVAAIHCKAGKGRTGVMICAYLLHRGKFLKAQEALDFYGEVRTRDKKGVTIPSQRRYVYYYSYLLKNHLDYRPVALLFHKMMFETIPMFSGGTCNPQFVVCQLKVKIYSSNSGPTRREDKFMYFEFPQPLPVCGDIKVEFFHKQNKMLKKDKMFHFWVNTFFIPGPEETSEKVENGSLCDQEIDSICSIERADNDKEYLVLTLTKNDLDKANKDKANRYFSPNFKVKLYFTKTVEEPSNPEASSSTSVTPDVSDNEPDHYRYSDTTDSDPENEPFDEDQHTQITKVHHHHHH

SEQ ID NO: 25 - protein, 1071 aa, synthetic construct
MKWVTFISLLFLFSSAYSRGVFRRDAHKSEVAHRFKDLGEENFKALVLIAFAQYLQQCPFEDHVKLVNEVTEFAKTCVADESAENCDKSLHTLFGDKLCTVATLRETYGEMADCCAKQEPERNECFLQHKDDNPNLPRLVRPEVDVMCTAFHDNEETFLKKYLYEIARRHPYFYAPELLFFAKRYKAAFTECCQAADKAACLLPKLDELRDEGKASSAKQRLKCASLQKFGERAFKAWAVARLSQRFPKAEFAEVSKLVTDLTKVHTECCHGDLLECADDRADLAKYICENQDSISSKLKECCEKPLLEKSHCIAEVENDEMPADLPSLAADFVESKDVCKNYAEAKDVFLGMFLYEYARRHPDYSVVLLLRLAKTYETTLEKCCAAADPHECYAKVFDEFKPLVEEPQNLIKQNCELFEQLGEYKFQNALLVRYTKKVPQVSTPTLVEVSRNLGKVGSKCCKHPEAKRMPCAEDYLSVVLNQLCVLHEKTPVSDRVTKCCTESLVNRRPCFSALEVDETYVPKEFNAETFTFHADICTLSEKERQIKKQTALVELVKHKPKATKEQLKAVMDDFAAFVEKCCKADDKETCFAEEGKKLVAASQAALGLSHYPAAVQSQAAAERGASATAKSRAISILQKKPRHQQLLPSLSSFFFSHRLPDMTAIIKEIVSRNKRRYQEDGFDLDLTYIYPNIIAMGFPAERLEGVYRNNIDDVVRFLDSKHKNHYKIYNLCAERHYDTAKFNCRVAQYPFEDHNPPQLELIKPFCEDLDQWLSEDDNHVAAIHCKAGKGRTGVMICAYLLHRGKFLKAQEALDFYGEVRTRDKKGVTIPSQRRYVYYYSYLLKNHLDYRPVALLFHKMMFETIPMFSGGTCNPQFVVCQLKVKIYSSNSGPTRREDKFMYFEFPQPLPVCGDIKVEFFHKQNKMLKKDKMFHFWVNTFFIPGPEETSEKVENGSLCDQEIDSICSIERADNDKEYLVLTLTKNDLDKANKDKANRYFSPNFKVKLYFTKTVEEPSNPEASSSTSVTPDVSDNEPDHYRYSDTTDSDPENEPFDEDQHTQITKVHHHHHH

SEQ ID NO: 26 - protein, 1199 aa, synthetic construct
MKWVTFISLLFLFSSAYSRGVFRRSESPVTISRAGNAGELVSPLLLPPTRRRRRRHIQGPGPVLNLPSAAAAPPVARAPEAAGGGSRSEDYSSSPHSAAAAARPLAAEEKQAQSLQPSSSRRSSHYPAAVQSQAAAERGASATAKSRAISILQKKPRHQQLLPSLSSFFFSHRLPDMTAIIKEIVSRNKRRYQEDGFDLDLTYIYPNIIAMGFPAERLEGVYRNNIDDVVRFLDSKHKNHYKIYNLCAERHYDTAKFNCRVAQYPFEDHNPPQLELIKPFCEDLDQWLSEDDNHVAAIHCKAGKGRTGVMICAYLLHRGKFLKAQEALDFYGEVRTRDKKGVTIPSQRRYVYYYSYLLKNHLDYRPVALLFHKMMFETIPMFSGGTCNPQFVVCQLKVKIYSSNSGPTRREDKFMYFEFPQPLPVCGDIKVEFFHKQNKMLKKDKMFHFWVNTFFIPGPEETSEKVENGSLCDQEIDSICSIERADNDKEYLVLTLTKNDLDKANKDKANRYFSPNFKVKLYFTKTVEEPSNPEASSSTSVTPDVSDNEPDHYRYSDTTDSDPENEPFDEDQHTQITKVHHHHHHGPAALKAATNRRKKRALDAAYDAHKSEVAHRFKDLGEENFKALVLIAFAQYLQQCPFEDHVKLVNEVTEFAKTCVADESAENCDKSLHTLFGDKLCTVATLRETYGEMADCCAKQEPERNECFLQHKDDNPNLPRLVRPEVDVMCTAFHDNEETFLKKYLYEIARRHPYFYAPELLFFAKRYKAAFTECCQAADKAACLLPKLDELRDEGKASSAKQRLKCASLQKFGERAFKAWAVARLSQRFPKAEFAEVSKLVTDLTKVHTECCHGDLLECADDRADLAKYICENQDSISSKLKECCEKPLLEKSHCIAEVENDEMPADLPSLAADFVESKDVCKNYAEAKDVFLGMFLYEYARRHPDYSVVLLLRLAKTYETTLEKCCAAADPHECYAKVFDEFKPLVEEPQNLIKQNCELFEQLGEYKFQNALLVRYTKKVPQVSTPTLVEVSRNLGKVGSKCCKHPEAKRMPCAEDYLSVVLNQLCVLHEKTPVSDRVTKCCTESLVNRRPCFSALEVDETYVPKEFNAETFTFHADICTLSEKERQIKKQTALVELVKHKPKATKEQLKAVMDDFAAFVEKCCKADDKETCFAEEGKKLVAASQAALGLDYKDDDDK

SEQ ID NO: 27 - protein, 1183 aa, synthetic construct
MKWVTFISLLFLFSSAYSRGVFRRSESPVTISRAGNAGELVSPLLLPPTRRRRRRHIQGPGPVLNLPSAAAAPPVARAPEAAGGGSRSEDYSSSPHSAAAAARPLAAEEKQAQSLQPSSSRRSSHYPAAVQSQAAAERGASATAKSRAISILQKKPRHQQLLPSLSSFFFSHRLPDMTAIIKEIVSRNKRRYQEDGFDLDLTYIYPNIIAMGFPAERLEGVYRNNIDDVVRFLDSKHKNHYKIYNLCAERHYDTAKFNCRVAQYPFEDHNPPQLELIKPFCEDLDQWLSEDDNHVAAIHCKAGKGRTGVMICAYLLHRGKFLKAQEALDFYGEVRTRDKKGVTIPSQRRYVYYYSYLLKNHLDYRPVALLFHKMMFETIPMFSGGTCNPQFVVCQLKVKIYSSNSGPTRREDKFMYFEFPQPLPVCGDIKVEFFHKQNKMLKKDKMFHFWVNTFFIPGPEETSEKVENGSLCDQEIDSICSIERADNDKEYLVLTLTKNDLDKANKDKANRYFSPNFKVKLYFTKTVEEPSNPEASSSTSVTPDVSDNEPDHYRYSDTTDSDPENEPFDEDQHTQITKVTNRRKKRALDAAYDAHKSEVAHRFKDLGEENFKALVLIAFAQYLQQCPFEDHVKLVNEVTEFAKTCVADESAENCDKSLHTLFGDKLCTVATLRETYGEMADCCAKQEPERNECFLQHKDDNPNLPRLVRPEVDVMCTAFHDNEETFLKKYLYEIARRHPYFYAPELLFFAKRYKAAFTECCQAADKAACLLPKLDELRDEGKASSAKQRLKCASLQKFGERAFKAWAVARLSQRFPKAEFAEVSKLVTDLTKVHTECCHGDLLECADDRADLAKYICENQDSISSKLKECCEKPLLEKSHCIAEVENDEMPADLPSLAADFVESKDVCKNYAEAKDVFLGMFLYEYARRHPDYSVVLLLRLAKTYETTLEKCCAAADPHECYAKVFDEFKPLVEEPQNLIKQNCELFEQLGEYKFQNALLVRYTKKVPQVSTPTLVEVSRNLGKVGSKCCKHPEAKRMPCAEDYLSVVLNQLCVLHEKTPVSDRVTKCCTESLVNRRPCFSALEVDETYVPKEFNAETFTFHADICTLSEKERQIKKQTALVELVKHKPKATKEQLKAVMDDFAAFVEKCCKADDKETCFAEEGKKLVAASQAALGLHHHHHH

SEQ ID NO: 28 - protein, 1170 aa, synthetic construct
MKWVTFISLLFLFSSAYSRGVFRRSESPVTISRAGNAGELVSPLLLPPTRRRRRRHIQGPGPVLNLPSAAAAPPVARAPEAAGGGSRSEDYSSSPHSAAAAARPLAAEEKQAQSLQPSSSRRSSHYPAAVQSQAAAERGASATAKSRAISILQKKPRHQQLLPSLSSFFFSHRLPDMTAIIKEIVSRNKRRYQEDGFDLDLTYIYPNIIAMGFPAERLEGVYRNNIDDVVRFLDSKHKNHYKIYNLCAERHYDTAKFNCRVAQYPFEDHNPPQLELIKPFCEDLDQWLSEDDNHVAAIHCKAGKGRTGVMICAYLLHRGKFLKAQEALDFYGEVRTRDKKGVTIPSQRRYVYYYSYLLKNHLDYRPVALLFHKMMFETIPMFSGGTCNPQFVVCQLKVKIYSSNSGPTRREDKFMYFEFPQPLPVCGDIKVEFFHKQNKMLKKDKMFHFWVNTFFIPGPEETSEKVENGSLCDQEIDSICSIERADNDKEYLVLTLTKNDLDKANKDKANRYFSPNFKVKLYFTKTVEEPSNPEASSSTSVTPDVSDNEPDHYRYSDTTDSDPENEPFDEDQHTQITKVDAHKSEVAHRFKDLGEENFKALVLIAFAQYLQQCPFEDHVKLVNEVTEFAKTCVADESAENCDKSLHTLFGDKLCTVATLRETYGEMADCCAKQEPERNECFLQHKDDNPNLPRLVRPEVDVMCTAFHDNEETFLKKYLYEIARRHPYFYAPELLFFAKRYKAAFTECCQAADKAACLLPKLDELRDEGKASSAKQRLKCASLQKFGERAFKAWAVARLSQRFPKAEFAEVSKLVTDLTKVHTECCHGDLLECADDRADLAKYICENQDSISSKLKECCEKPLLEKSHCIAEVENDEMPADLPSLAADFVESKDVCKNYAEAKDVFLGMFLYEYARRHPDYSVVLLLRLAKTYETTLEKCCAAADPHECYAKVFDEFKPLVEEPQNLIKQNCELFEQLGEYKFQNALLVRYTKKVPQVSTPTLVEVSRNLGKVGSKCCKHPEAKRMPCAEDYLSVVLNQLCVLHEKTPVSDRVTKCCTESLVNRRPCFSALEVDETYVPKEFNAETFTFHADICTLSEKERQIKKQTALVELVKHKPKATKEQLKAVMDDFAAFVEKCCKADDKETCFAEEGKKLVAASQAALGLHHHHHH

SEQ ID NO: 29 - protein, 1063 aa, synthetic construct
MKWVTFISLLFLFSSAYSRGVFRRSESPVTPPTRRRRRRHIQGPGPKKPRHQQLLPSLSSFFFSHRLPDMTAIIKEIVSRNKRRYQEDGFDLDLTYIYPNIIAMGFPAERLEGVYRNNIDDVVRFLDSKHKNHYKIYNLCAERHYDTAKFNCRVAQYPFEDHNPPQLELIKPFCEDLDQWLSEDDNHVAAIHCKAGKGRTGVMICAYLLHRGKFLKAQEALDFYGEVRTRDKKGVTIPSQRRYVYYYSYLLKNHLDYRPVALLFHKMMFETIPMFSGGTCNPQFVVCQLKVKIYSSNSGPTRREDKFMYFEFPQPLPVCGDIKVEFFHKQNKMLKKDKMFHFWVNTFFIPGPEETSEKVENGSLCDQEIDSICSIERADNDKEYLVLTLTKNDLDKANKDKANRYFSPNFKVKLYFTKTVEEPSNPEASSSTSVTPDVSDNEPDHYRYSDTTDSDPENEPFDEDQHTQITKVDAHKSEVAHRFKDLGEENFKALVLIAFAQYLQQCPFEDHVKLVNEVTEFAKTCVADESAENCDKSLHTLFGDKLCTVATLRETYGEMADCCAKQEPERNECFLQHKDDNPNLPRLVRPEVDVMCTAFHDNEETFLKKYLYEIARRHPYFYAPELLFFAKRYKAAFTECCQAADKAACLLPKLDELRDEGKASSAKQRLKCASLQKFGERAFKAWAVARLSQRFPKAEFAEVSKLVTDLTKVHTECCHGDLLECADDRADLAKYICENQDSISSKLKECCEKPLLEKSHCIAEVENDEMPADLPSLAADFVESKDVCKNYAEAKDVFLGMFLYEYARRHPDYSVVLLLRLAKTYETTLEKCCAAADPHECYAKVFDEFKPLVEEPQNLIKQNCELFEQLGEYKFQNALLVRYTKKVPQVSTPTLVEVSRNLGKVGSKCCKHPEAKRMPCAEDYLSVVLNQLCVLHEKTPVSDRVTKCCTESLVNRRPCFSALEVDETYVPKEFNAETFTFHADICTLSEKERQIKKQTALVELVKHKPKATKEQLKAVMDDFAAFVEKCCKADDKETCFAEEGKKLVAASQAALGLHHHHHH

SEQ ID NO: 30 - protein, 1076 aa, synthetic construct
MKWVTFISLLFLFSSAYSRGVFRRSESPVTPPTRRRRRRHIQGPGPKKPRHQQLLPSLSSFFFSHRLPDMTAIIKEIVSRNKRRYQEDGFDLDLTYIYPNIIAMGFPAERLEGVYRNNIDDVVRFLDSKHKNHYKIYNLCAERHYDTAKFNCRVAQYPFEDHNPPQLELIKPFCEDLDQWLSEDDNHVAAIHCKAGKGRTGVMICAYLLHRGKFLKAQEALDFYGEVRTRDKKGVTIPSQRRYVYYYSYLLKNHLDYRPVALLFHKMMFETIPMFSGGTCNPQFVVCQLKVKIYSSNSGPTRREDKFMYFEFPQPLPVCGDIKVEFFHKQNKMLKKDKMFHFWVNTFFIPGPEETSEKVENGSLCDQEIDSICSIERADNDKEYLVLTLTKNDLDKANKDKANRYFSPNFKVKLYFTKTVEEPSNPEASSSTSVTPDVSDNEPDHYRYSDTTDSDPENEPFDEDQHTQITKVTNRRKKRALDAAYDAHKSEVAHRFKDLGEENFKALVLIAFAQYLQQCPFEDHVKLVNEVTEFAKTCVADESAENCDKSLHTLFGDKLCTVATLRETYGEMADCCAKQEPERNECFLQHKDDNPNLPRLVRPEVDVMCTAFHDNEETFLKKYLYEIARRHPYFYAPELLFFAKRYKAAFTECCQAADKAACLLPKLDELRDEGKASSAKQRLKCASLQKFGERAFKAWAVARLSQRFPKAEFAEVSKLVTDLTKVHTECCHGDLLECADDRADLAKYICENQDSISSKLKECCEKPLLEKSHCIAEVENDEMPADLPSLAADFVESKDVCKNYAEAKDVFLGMFLYEYARRHPDYSVVLLLRLAKTYETTLEKCCAAADPHECYAKVFDEFKPLVEEPQNLIKQNCELFEQLGEYKFQNALLVRYTKKVPQVSTPTLVEVSRNLGKVGSKCCKHPEAKRMPCAEDYLSVVLNQLCVLHEKTPVSDRVTKCCTESLVNRRPCFSALEVDETYVPKEFNAETFTFHADICTLSEKERQIKKQTALVELVKHKPKATKEQLKAVMDDFAAFVEKCCKADDKETCFAEEGKKLVAASQAALGLHHHHHH

SEQ ID NO: 31 - protein, 585 aa, synthetic construct
MKWVTFISLLFLFSSAYSRGVFRRSESPVTISRAGNAGELVSPLLLPPTRRRRRRHIQGPGPVLNLPSAAAAPPVARAPEAAGGGSRSEDYSSSPHSAAAAARPLAAEEKQAQSLQPSSSRRSSHYPAAVQSQAAAERGASATAKSRAISILQKKPRHQQLLPSLSSFFFSHRLPDMTAIIKEIVSRNKRRYQEDGFDLDLTYIYPNIIAMGFPAERLEGVYRNNIDDVVRFLDSKHKNHYKIYNLCAERHYDTAKFNCRVAQYPFEDHNPPQLELIKPFCEDLDQWLSEDDNHVAAIHCKAGKGRTGVMICAYLLHRGKFLKAQEALDFYGEVRTRDKKGVTIPSQRRYVYYYSYLLKNHLDYRPVALLFHKMMFETIPMFSGGTCNPQFVVCQLKVKIYSSNSGPTRREDKFMYFEFPQPLPVCGDIKVEFFHKQNKMLKKDKMFHFWVNTFFIPGPEETSEKVENGSLCDQEIDSICSIERADNDKEYLVLTLTKNDLDKANKDKANRYFSPNFKVKLYFTKTVEEPSNPEASSSTSVTPDVSDNEPDHYRYSDTTDSDPENEPFDEDQHTQITKVHHHHHH

SEQ ID NO: 32 - protein, 580 aa, synthetic construct
MEFGLSWVFLVAILKGVQCSESPVTISRAGNAGELVSPLLLPPTRRRRRRHIQGPGPVLNLPSAAAAPPVARAPEAAGGGSRSEDYSSSPHSAAAAARPLAAEEKQAQSLQPSSSRRSSHYPAAVQSQAAAERGASATAKSRAISILQKKPRHQQLLPSLSSFFFSHRLPDMTAIIKEIVSRNKRRYQEDGFDLDLTYIYPNIIAMGFPAERLEGVYRNNIDDVVRFLDSKHKNHYKIYNLCAERHYDTAKFNCRVAQYPFEDHNPPQLELIKPFCEDLDQWLSEDDNHVAAIHCKAGKGRTGVMICAYLLHRGKFLKAQEALDFYGEVRTRDKKGVTIPSQRRYVYYYSYLLKNHLDYRPVALLFHKMMFETIPMFSGGTCNPQFVVCQLKVKIYSSNSGPTRREDKFMYFEFPQPLPVCGDIKVEFFHKQNKMLKKDKMFHFWVNTFFIPGPEETSEKVENGSLCDQEIDSICSIERADNDKEYLVLTLTKNDLDKANKDKANRYFSPNFKVKLYFTKTVEEPSNPEASSSTSVTPDVSDNEPDHYRYSDTTDSDPENEPFDEDQHTQITKVHHHHHH

SEQ ID NO: 33 - protein, 585 aa, synthetic construct
MKWVTFISLLFLFSSAYSRGVFRRSESPVTPSRAGNAGELVSPLLPPPTRRRRRRHIQGPGPVLNLPSAAAAPPVARAPEAAGGGSRSEDYSSSPHSAAAAARPPAAEEKQAQSLQPSSSRRSSHYPAAVQSQAAAERGASATAKSRAISILQKKPRHQQLLPSLSSFFFSHRLPDMTAIIKEIVSRNKRRYQEDGFDLDLTYIYPNIIAMGFPAERLEGVYRNNIDDVVRFLDSKHKNHYKIYNLCAERHYDTAKFNCRVAQYPFEDHNPPQLELIKPFCEDLDQWLSEDDNHVAAIHCKAGKGRTGVMICAYLLHRGKFLKAQEALDFYGEVRTRDKKGVTIPSQRRYVYYYSYLLKNHLDYRPVALLFHKMMFETIPMFSGGTCNPQFVVCQLKVKIYSSNSGPTRREDKFMYFEFPQPLPVCGDIKVEFFHKQNKMLKKDKMFHFWVNTFFIPGPEETSEKVENGSLCDQEIDSICSIERADNDKEYLVLTLTKNDLDKANKDKANRYFSPNFKVKLYFTKTVEEPSNPEASSSTSVTPDVSDNEPDHYRYSDTTDSDPENEPFDEDQHTQITKVHHHHHH

SEQ ID NO: 34 - protein, 799 aa, synthetic construct
MEFGLSWVFLVAILKGVQCSESPVTISRAGNAGELVSPLLLPPTRRRRRRHIQGPGPVLNLPSAAAAPPVARAPEAAGGGSRSEDYSSSPHSAAAAARPLAAEEKQAQSLQPSSSRRSSHYPAAVQSQAAAERGASATAKSRAISILQKKPRHQQLLPSLSSFFFSHRLPDMTAIIKEIVSRNKRRYQEDGFDLDLTYIYPNIIAMGFPAERLEGVYRNNIDDVVRFLDSKHKNHYKIYNLCAERHYDTAKFNCRVAQYPFEDHNPPQLELIKPFCEDLDQWLSEDDNHVAAIHCKAGKGRTGVMICAYLLHRGKFLKAQEALDFYGEVRTRDKKGVTIPSQRRYVYYYSYLLKNHLDYRPVALLFHKMMFETIPMFSGGTCNPQFVVCQLKVKIYSSNSGPTRREDKFMYFEFPQPLPVCGDIKVEFFHKQNKMLKKDKMFHFWVNTFFIPGPEETSEKVENGSLCDQEIDSICSIERADNDKEYLVLTLTKNDLDKANKDKANRYFSPNFKVKLYFTKTVEEPSNPEASSSTSVTPDVSDNEPDHYRYSDTTDSDPENEPFDEDQHTQITKVHHHHHHPCPAPELLGGPSVFLFPPKPKDTLMISRTPEVTCVVVDVSHEDPEVKFNWYVDGVEVHNAKTKPREEQYNSTYRVVSVLTVLHQDWLNGKEYKCKVSNKALPAPIEKTISKAKGQPREPQVYTLPPSRDELTKNQVSLTCLVKGFYPSDIAVEWESNGQPENNYKTTPPVLDSDGSFFLYSKLTVDKSRWQQGNVFSCSVMHEALHNHYTQKSLSLSPG

SEQ ID NO: 35 - protein, 811 aa, synthetic construct
MEFGLSWVFLVAILKGVQCSESPVTISRAGNAGELVSPLLLPPTRRRRRRHIQGPGPVLNLPSAAAAPPVARAPEAAGGGSRSEDYSSSPHSAAAAARPLAAEEKQAQSLQPSSSRRSSHYPAAVQSQAAAERGASATAKSRAISILQKKPRHQQLLPSLSSFFFSHRLPDMTAIIKEIVSRNKRRYQEDGFDLDLTYIYPNIIAMGFPAERLEGVYRNNIDDVVRFLDSKHKNHYKIYNLCAERHYDTAKFNCRVAQYPFEDHNPPQLELIKPFCEDLDQWLSEDDNHVAAIHCKAGKGRTGVMICAYLLHRGKFLKAQEALDFYGEVRTRDKKGVTIPSQRRYVYYYSYLLKNHLDYRPVALLFHKMMFETIPMFSGGTCNPQFVVCQLKVKIYSSNSGPTRREDKFMYFEFPQPLPVCGDIKVEFFHKQNKMLKKDKMFHFWVNTFFIPGPEETSEKVENGSLCDQEIDSICSIERADNDKEYLVLTLTKNDLDKANKDKANRYFSPNFKVKLYFTKTVEEPSNPEASSSTSVTPDVSDNEPDHYRYSDTTDSDPENEPFDEDQHTQITKVHHHHHHEPKSSDKTHTCPPCPAPELLGGPSVFLFPPKPKDTLMISRTPEVTCVVVDVSHEDPEVKFNWYVDGVEVHNAKTKPREEQYQSTYRVVSVLTVLHQDWLNGKEYKCKVSNKALPAPIEKTISKAKGQPREPQVYTLPPSRDELTKNQVSLTCLVKGFYPSDIAVEWESNGQPENNYKTTPPVLDSDGSFFLYSKLTVDKSRWQQGNVFSCSVMHEALHNHYTQKSLSLSPG

SEQ ID NO: 36 - protein, 798 aa, synthetic construct
MEFGLSWVFLVAILKGVQCPCPAPELLGGPSVFLFPPKPKDTLMISRTPEVTCVVVDVSHEDPEVKFNWYVDGVEVHNAKTKPREEQYNSTYRVVSVLTVLHQDWLNGKEYKCKVSNKALPAPIEKTISKAKGQPREPQVYTLPPSRDELTKNQVSLTCLVKGFYPSDIAVEWESNGQPENNYKTTPPVLDSDGSFFLYSKLTVDKSRWQQGNVFSCSVMHEALHNHYTQKSLSLSPGGGGGSISRAGNAGELVSPLLLPPTRRRRRRHIQGPGPVLNLPSAAAAPPVARAPEAAGGGSRSEDYSSSPHSAAAAARPLAAEEKQAQSLQPSSSRRSSHYPAAVQSQAAAERGASATAKSRAISILQKKPRHQQLLPSLSSFFFSHRLPDMTAIIKEIVSRNKRRYQEDGFDLDLTYIYPNIIAMGFPAERLEGVYRNNIDDVVRFLDSKHKNHYKIYNLCAERHYDTAKFNCRVAQYPFEDHNPPQLELIKPFCEDLDQWLSEDDNHVAAIHCKAGKGRTGVMICAYLLHRGKFLKAQEALDFYGEVRTRDKKGVTIPSQRRYVYYYSYLLKNHLDYRPVALLFHKMMFETIPMFSGGTCNPQFVVCQLKVKIYSSNSGPTRREDKFMYFEFPQPLPVCGDIKVEFFHKQNKMLKKDKMFHFWVNTFFIPGPEETSEKVENGSLCDQEIDSICSIERADNDKEYLVLTLTKNDLDKANKDKANRYFSPNFKVKLYFTKTVEEPSNPEASSSTSVTPDVSDNEPDHYRYSDTTDSDPENEPFDEDQHTQITKVHHHHHH

SEQ ID NO: 37 - protein, 995 aa, synthetic construct
MKWVTFISLLFLFSSAYSRGVFRRYPYDVPDYACMTAIIKEIVSRNKRRYQEDGFDLDLTYIYPNIIAMGFPAERLEGVYRNNIDDVVRFLDSKHKNHYKIYNLCAERHYDTAKFNCRVAQYPFEDHNPPQLELIKPFCEDLDQWLSEDDNHVAAIHCKAGKGRTGVMICAYLLHRGKFLKAQEALDFYGEVRTRDKKGVTIPSQRRYVYYYSYLLKNHLDYRPVALLFHKMMFETIPMFSGGTCNPQFVVCQLKVKIYSSNSGPTRREDKFMYFEFPQPLPVCGDIKVEFFHKQNKMLKKDKMFHFWVNTFFIPGPEETSEKVENGSLCDQEIDSICSIERADNDKEYLVLTLTKNDLDKANKDKANRYFSPNFKVKLYFTKTVEEPSNPEASSSTSVTPDVSDNEPDHYRYSDTTDSDPENEPFDEDQHTQITKVGGGGSRAGNAGELVSPLLLPPTRRRRRRHIQGPGPVLNLPSAAAAPPVARAPEAAGGGSRSEDYSSSPHSAAAAARPLAAEEKQAQSLQPSSSRRSSHYPAAVQSQAAAERGASATAKSRAISILQKKPRHQQLLPSLSSFFFSHRLPDMTAIIKEIVSRNKRRYQEDGFDLDLTYIYPNIIAMGFPAERLEGVYRNNIDDVVRFLDSKHKNHYKIYNLCAERHYDTAKFNCRVAQYPFEDHNPPQLELIKPFCEDLDQWLSEDDNHVAAIHCKAGKGRTGVMICAYLLHRGKFLKAQEALDFYGEVRTRDKKGVTIPSQRRYVYYYSYLLKNHLDYRPVALLFHKMMFETIPMFSGGTCNPQFVVCQLKVKIYSSNSGPTRREDKFMYFEFPQPLPVCGDIKVEFFHKQNKMLKKDKMFHFWVNTFFIPGPEETSEKVENGSLCDQEIDSICSIERADNDKEYLVLTLTKNDLDKANKDKANRYFSPNFKVKLYFTKTVEEPSNPEASSSTSVTPDVSDNEPDHYRYSDTTDSDPENEPFDEDQHTQITKVHHHHHH

SEQ ID NO: 38 - protein, 1159 aa, synthetic construct
MKWVTFISLLFLFSSAYSRGVFRRDAHKSEVAHRFKDLGEENFKALVLIAFAQYLQQCPFEDHVKLVNEVTEFAKTCVADESAENCDKSLHTLFGDKLCTVATLRETYGEMADCCAKQEPERNECFLQHKDDNPNLPRLVRPEVDVMCTAFHDNEETFLKKYLYEIARRHPYFYAPELLFFAKRYKAAFTECCQAADKAACLLPKLDELRDEGKASSAKQRLKCASLQKFGERAFKAWAVARLSQRFPKAEFAEVSKLVTDLTKVHTECCHGDLLECADDRADLAKYICENQDSISSKLKECCEKPLLEKSHCIAEVENDEMPADLPSLAADFVESKDVCKNYAEAKDVFLGMFLYEYARRHPDYSVVLLLRLAKTYETTLEKCCAAADPHECYAKVFDEFKPLVEEPQNLIKQNCELFEQLGEYKFQNALLVRYTKKVPQVSTPTLVEVSRNLGKVGSKCCKHPEAKRMPCAEDYLSVVLNQLCVLHEKTPVSDRVTKCCTESLVNRRPCFSALEVDETYVPKEFNAETFTFHADICTLSEKERQIKKQTALVELVKHKPKATKEQLKAVMDDFAAFVEKCCKADDKETCFAEEGKKLVAASQAALGLISRAGNAGELVSPLLLPPTRRRRRRHIQGPGPVLNLPSAAAAPPVARAPEAAGGGSRSEDYSSSPHSAAAAARPLAAEEKQAQSLQPSSSRRSSHYPAAVQSQAAAERGASATAKSRAISILQKKPRHQQLLPSLSSFFFSHRLPDGGGGSMEEPQSDPSVEPPLSQETFSDLWKLLPENNVLSPLPSQAMDDLMLSPDDIEQWFTEDPGPDEAPRMPEAAPPVAPAPAAPTPAAPAPAPSWPLSSSVPSQKTYQGSYGFRLGFLHSGTAKSVTCTYSPALNKMFCQLAKTCPVQLWVDSTPPPGTRVRAMAIYKQSQHMTEVVRRCPHHERCSDSDGLAPPQHLIRVEGNLRVEYLDDRNTFRHSVVVPYEPPEVGSDCTTIHYNYMCNSSCMGGMNRRPILTIITLEDSSGNLLGRNSFEVRVCACPGRDRRTEEENLRKKGEPHHELPPGSTKRALPNNTSSSPQPKKKPLDGEYFTLQIRGRERFEMFRELNEALELKDAQAGKEPGGSRAHSSHLKSKKGQSTSRHKKLMFKTEGPDSDHHHHHH

SEQ ID NO: 39 - protein, 6 aa, synthetic construct
RRRRRR

SEQ ID NO: 40 - protein, 23 aa, synthetic construct
KKPRHQQLLPSLSSFFFSHRLPD

SEQ ID NO: 41 - DNA, 1743 bp, synthetic construct
  source 1..1743: mol_type = other DNA
atgaaacgcatgaaatcgctggctgcggcgctcaccgtcgctggggccatgctggccgcacctgtggcaacggcatccgagtctcctgtgaccatctctcgcgctggcaacgctggcgagcttgtctctccgctgctgcttcctcctacccgtcgtcgtcgtcgtcgccacatccagggtccaggcccagtgctgaacctgccatccgcagctgctgcaccaccagttgcacgtgcaccagaagctgccggcggtggctcccgctccgaggactactcctcctccccacactccgcagctgctgcagctcgcccactggcagcagaagagaagcaggcacagtccctgcagccatcctcctcccgccgctcctcccactacccagctgctgttcagtcccaggcagctgctgaacgcggtgcttccgcaaccgcaaagtcccgtgcaatctccatcctgcagaagaagccacgccaccagcagctgctgccatccctgtcctccttcttcttctcccaccgcctgccagacatgaccgctatcatcaaggaaatcgtttcccgcaacaagcgccgctaccaggaagatggcttcgatctggacctgacctacatctacccaaacatcatcgcaatgggtttcccagctgaacgcctggagggcgtgtaccgcaacaacatcgatgacgtggtccgcttcctggactccaagcacaagaaccactacaagatctacaacctgtgcgctgaacgccactacgataccgccaagttcaactgccgcgtcgcacagtacccattcgaggaccacaacccaccacagctggaactgatcaagccattctgcgaggatctggaccagtggctgtccgaagatgacaaccacgttgcagctatccactgcaaggctggcaagggccgcaccggtgtgatgatctgcgcctacctgctgcaccgcggcaagttcctgaaggctcaggaagccctggatttctacggtgaggttcgcacccgcgacaagaagggcgtgaccatcccatcccagcgccgctacgtgtactactactcctacctgctgaagaaccacctggattaccgcccagtcgctctgctgttccacaagatgatgttcgaaaccatcccaatgttctccggtggcacctgcaacccacagttcgttgtgtgccagctgaaggtcaagatctactcctccaactccggtccaacccgtcgcgaggataagttcatgtacttcgagttcccacagccactgccagtgtgcggcgacatcaaggtcgaattcttccacaagcagaacaagatgctgaagaaggataagatgttccacttctgggtcaacaccttcttcatcccaggtccagaagaaacctctgaaaaggttgagaacggctccctgtgcgatcaggagatcgactccatctgctccatcgaacgcgcagataacgacaaggagtacctggttctgaccctgaccaagaacgatctggacaaggccaacaaggacaaggcaaaccgctacttctccccaaacttcaaggtcaagctgtacttcaccaagaccgttgaagagccatccaacccagaagcttcctcctccacctctgtgaccccagatgtttccgacaacgagccagatcactaccgctactccgataccaccgactccgaccctgagaacgagccattcgacgaggaccagcacacccagattaccaaagtctaa

SEQ ID NO: 42 - DNA, 1776 bp, synthetic construct
  source 1..1776: mol_type = other DNA
atgtttaacaaccgtatccgcactgcagctctcgctggtgcaatcgcaatctccaccgcagcttccggcgtagctatcccagcattcgctgcagagaccaacccaacctccgagtcccctgtgaccatctcccgcgccggcaacgctggtgaactcgtgtccccgctcctcctccctccgacccgccgtcgtcgccgtcgccacatccagggtccaggcccagtgctgaacctgccatccgcagctgctgcaccaccagttgcacgtgcaccagaagctgccggcggtggctcccgctccgaggactactcctcctccccacactccgcagctgctgcagctcgcccactggcagcagaagagaagcaggcacagtccctgcagccatcctcctcccgccgctcctcccactacccagctgctgttcagtcccaggcagctgctgaacgcggtgcttccgcaaccgcaaagtcccgtgcaatctccatcctgcagaagaagccacgccaccagcagctgctgccatccctgtcctccttcttcttctcccaccgcctgccagacatgaccgctatcatcaaggaaatcgtttcccgcaacaagcgccgctaccaggaagatggcttcgatctggacctgacctacatctacccaaacatcatcgcaatgggtttcccagctgaacgcctggagggcgtgtaccgcaacaacatcgatgacgtggtccgcttcctggactccaagcacaagaaccactacaagatctacaacctgtgcgctgaacgccactacgataccgccaagttcaactgccgcgtcgcacagtacccattcgaggaccacaacccaccacagctggaactgatcaagccattctgcgaggatctggaccagtggctgtccgaagatgacaaccacgttgcagctatccactgcaaggctggcaagggccgcaccggtgtgatgatctgcgcctacctgctgcaccgcggcaagttcctgaaggctcaggaagccctggatttctacggtgaggttcgcacccgcgacaagaagggcgtgaccatcccatcccagcgccgctacgtgtactactactcctacctgctgaagaaccacctggattaccgcccagtcgctctgctgttccacaagatgatgttcgaaaccatcccaatgttctccggtggcacctgcaacccacagttcgttgtgtgccagctgaaggtcaagatctactcctccaactccggtccaacccgtcgcgaggataagttcatgtacttcgagttcccacagccactgccagtgtgcggcgacatcaaggtcgaattcttccacaagcagaacaagatgctgaagaaggataagatgttccacttctgggtcaacaccttcttcatcccaggtccagaagaaacctctgaaaaggttgagaacggctccctgtgcgatcaggagatcgactccatctgctccatcgaacgcgcagataacgacaaggagtacctggttctgaccctgaccaagaacgatctggacaaggccaacaaggacaaggcaaaccgctacttctccccaaacttcaaggtcaagctgtacttcaccaagaccgttgaagagccatccaacccagaagcttcctcctccacctctgtgaccccagatgtttccgacaacgagccagatcactaccgctactccgataccaccgactccgacccagagaacgagccattcgatgaagaccagcacacccagattaccaaagtttag

SEQ ID NO: 43 - DNA, 1785 bp, synthetic construct
  source 1..1785: mol_type = other DNA
atgaacaataacgatctctttcaggcatcacgtcggcgttttctggcacaactcggcggcttaaccgtcgccgggatgctggggccgtcattgttaacgccgcgacgtgcgactgcgtccgagtctcctgtgaccatctctcgcgctggcaacgctggcgagctggtctctcctctgctgcttcctcctacccgtcgtcgtcgtcgtcgccacatccagggtccaggcccagtgctgaacctgccatccgcagctgctgcaccaccagttgcacgcgcaccagaagctgccggcggtggctcccgctccgaggactactcctcctccccacactccgcagctgctgcagctcgcccactggcagcagaagagaagcaggcacagtccctgcagccatcctcctcccgccgctcctcccactacccagctgctgttcagtcccaggcagctgctgaacgcggtgcttccgcaaccgcaaagtcccgtgcaatctccatcctgcagaagaagccacgccaccagcagctgctgccatccctgtcctccttcttcttctcccaccgcctgccagacatgaccgctatcatcaaggaaatcgtttcccgcaacaagcgccgctaccaggaagatggcttcgatctggacctgacctacatctacccaaacatcatcgcaatgggtttcccagctgaacgcctggagggcgtgtaccgcaacaacatcgatgacgtggtccgcttcctggactccaagcacaagaaccactacaagatctacaacctgtgcgctgaacgccactacgataccgccaagttcaactgccgcgtcgcacagtacccattcgaggaccacaacccaccacagctggaactgatcaagccattctgcgaggatctggaccagtggctgtccgaagatgacaaccacgttgcagctatccactgcaaggctggcaagggccgcaccggtgtgatgatctgcgcctacctgctgcaccgcggcaagttcctgaaggctcaggaagccctggatttctacggtgaggttcgcacccgcgacaagaagggcgtgaccatcccatcccagcgccgctacgtgtactactactcctacctgctgaagaaccacctggattaccgcccagtcgctctgctgttccacaagatgatgttcgaaaccatcccaatgttctccggtggcacctgcaacccacagttcgttgtgtgccagctgaaggtcaagatctactcctccaactccggtccaacccgtcgcgaggataagttcatgtacttcgagttcccacagccactgccagtgtgcggcgacatcaaggtcgaattcttccacaagcagaacaagatgctgaagaaggataagatgttccacttctgggtcaacaccttcttcatcccaggtccagaagaaacctctgaaaaggttgagaacggctccctgtgcgatcaggagatcgactccatctgctccatcgaacgcgcagataacgacaaggagtacctggttctgaccctgaccaagaacgatctggacaaggccaacaaggacaaggcaaaccgctacttctccccaaacttcaaggtcaagctgtacttcaccaagaccgttgaagagccatccaacccagaagcttcctcctccacctctgtgaccccagatgtttccgacaacgagccagatcactaccgctactccgataccaccgactccgaccctgagaacgagccattcgatgaagaccagcacacccagattaccaaagtttag

SEQ ID NO: 44 - DNA, 1761 bp, synthetic construct
  source 1..1761: mol_type = other DNA
atgaaattatcgaagcgtggtttattctggctgttaggtttagtctcatttgcgatcttgttgttgttctctcagcccttgggtgctcaagcttcagagtctccagtgacgatttcgcgggcgggtaacgccggtgaattggttagcccgctattgctgccaccgacccgccgacggcgtcggcgtcatattcagggcccaggtccggttttgaacttgccttcagcggcagctgcgcctcccgtcgctcgggcacctgaagccgctgggggcggctcgcgctcagaggattatagtagtagtccccacagtgccgccgctgcggcccgccccctagccgccgaggaaaaacaagcacagtcattacagccttctagttcacgccgtagttctcattacccggcagctgtccaaagccaagcggcggccgagcgtggggcaagcgccactgccaagagccgtgcaatttcgattttacaaaagaaaccacgtcatcaacagttactgccgtcattatctagctttttctttagtcatcggctaccagatatgacagctattattaaagaaattgttagtcgaaataagcggcgctatcaagaagatggtttcgatttagatttaacatacatttatccaaatatcattgcgatgggatttcccgctgagcggttggaaggcgtctatcgaaacaatatcgacgatgttgtccggtttttagattcgaagcataagaatcactacaagatttacaacctgtgtgcagaacggcattatgacactgcgaagtttaattgtcgagttgcacaatatccgtttgaagatcataaccccccacaattagagttaatcaaaccattttgtgaagatttagatcagtggttaagtgaagatgataatcacgtggcggctattcattgtaaggctgggaagggtcgtacaggcgtgatgatttgcgcttacttattacaccgtggaaagtttctaaaagcgcaagaagcattagatttctatggtgaagttcgtacccgagataaaaagggcgtcacgatcccgagtcaacgccgctatgtttactactattcgtacttactaaagaatcacctagattatcgcccagtcgctttgttgttccataagatgatgtttgaaacgattccaatgttttctggtggcacgtgtaacccgcaatttgtagtgtgtcaactaaaagtgaagatatatagttcaaatagtgggcccactcgacgggaagataagttcatgtatttcgagtttccacagccattgccagtttgcggagacatcaaagtcgaatttttccacaagcaaaataagatgctgaaaaaagataaaatgtttcacttttgggtaaacactttctttattccaggaccagaagaaacctctgaaaaagtcgaaaatggttcgttatgcgatcaagaaattgattcgatttgtagtattgaacgtgcggacaatgacaaagaatatctggtattgactttgacgaaaaatgacttggacaaagccaataaagataaggcaaatcggtacttttcaccgaacttcaaggtcaaattatattttacgaaaactgtggaagaaccatcaaatccagaggcaagctcaagcaccagtgttacacctgacgtcagtgacaacgaacctgatcattatcggtatagcgacaccacggattcagatcctgaaaatgaaccgtttgacgaagatcaacatactcagatcacgaaagtttga

SEQ ID NO: 45 - DNA, 1749 bp, synthetic construct
  source 1..1749: mol_type = other DNA
atgaaagaagtgcgtttctggggtttactattagggttgtttgtctgtttgggtgctgttatccctctggtatctaaagcctcagagtctccagtgacgatttcgcgggcgggtaacgccggtgaattggttagcccgctattgctgccaccgacccgccgacggcgtcggcgtcatattcagggcccaggtccggttttgaacttgccttcagcggcagctgcgcctcccgtcgctcgggcacctgaagccgctgggggcggctcgcgctcagaggattatagtagtagtccccacagtgccgccgctgcggcccgccccctagccgccgaggaaaaacaagcacagtcattacagccttctagttcacgccgtagttctcattacccggcagctgtccaaagccaagcggcggccgagcgtggggcaagcgccactgccaagagccgtgcaatttcgattttacaaaagaaaccacgtcatcaacagttactgccgtcattatctagctttttctttagtcatcggctaccagatatgacagctattattaaagaaattgttagtcgaaataagcggcgctatcaagaagatggtttcgatttagatttaacatacatttatccaaatatcattgcgatgggatttcccgctgagcggttggaaggcgtctatcgaaacaatatcgacgatgttgtccggtttttagattcgaagcataagaatcactacaagatttacaacctgtgtgcagaacggcattatgacactgcgaagtttaattgtcgagttgcacaatatccgtttgaagatcataaccccccacaattagagttaatcaaaccattttgtgaagatttagatcagtggttaagtgaagatgataatcacgtggcggctattcattgtaaggctgggaagggtcgtacaggcgtgatgatttgcgcttacttattacaccgtggaaagtttctaaaagcgcaagaagcattagatttctatggtgaagttcgtacccgagataaaaagggcgtcacgatcccgagtcaacgccgctatgtttactactattcgtacttactaaagaatcacctagattatcgcccagtcgctttgttgttccataagatgatgtttgaaacgattccaatgttttctggtggcacgtgtaacccgcaatttgtagtgtgtcaactaaaagtgaagatatatagttcaaatagtgggcccactcgacgggaagataagttcatgtatttcgagtttccacagccattgccagtttgcggagacatcaaagtcgaatttttccacaagcaaaataagatgctgaaaaaagataaaatgtttcacttttgggtaaacactttctttattccaggaccagaagaaacctctgaaaaagtcgaaaatggttcgttatgcgatcaagaaattgattcgatttgtagtattgaacgtgcggacaatgacaaagaatatctggtattgactttgacgaaaaatgacttggacaaagccaataaagataaggcaaatcggtacttttcaccgaacttcaaggtcaaattatattttacgaaaactgtggaagaaccatcaaatccagaggcaagctcaagcaccagtgttacacctgacgtcagtgacaacgaacctgatcattatcggtatagcgacaccacggattcagatcctgaaaatgaaccgtttgacgaagatcaacatactcagatcacgaaagtttga

SEQ ID NO: 46 - DNA, 3741 bp, synthetic construct
  source 1..3741: mol_type = other DNA
atgagattcccatctattttcaccgctgtcttgttcgctgcctcctctgcattggctgcccctgttaacactaccactgaagacgagactgctcaaattccagctgaagcagttatcggttactctgaccttgagggtgatttcgacgtcgctgttttgcctttctctaactccactaacaacggtttgttgttcattaacaccactatcgcttccattgctgctaaggaagagggtgtctctctcgagaaaagagatgctcataaatcagaggttgcacataggtttaaagatttgggtgaggaaaatttcaaggctctagttttgattgcatttgcacaatacctacagcaatgtccatttgaagatcacgtaaaattggtcaatgaagtcacagagtttgcaaagacatgcgtcgccgacgagagtgcagagaattgtgacaaatccttgcataccctttttggtgataagctatgtacagttgctacattgcgtgagacatatggtgagatggctgattgttgtgcaaagcaagagcccgaaaggaacgaatgtttcttgcaacataaagatgataatccaaatctgcctagattggtcagacctgaagtggacgtcatgtgtaccgctttccacgataacgaagagactttcttgaaaaagtacttgtatgaaatcgctagacgtcatccttacttctatgcaccagaattgcttttcttcgctaagcgatacaaagctgctttcactgagtgttgtcaggccgcagacaaagcagcttgtctgttacctaagctcgacgaattgcgtgacgagggtaaggcaagctccgctaaacaaagactgaagtgcgctagcttgcagaagtttggagaaagagcttttaaggcctgggctgtggcacgactgtcacaacgttttcctaaggctgagttcgctgaggtttcaaaactagttacagatttgacaaaagtgcacacagaatgctgtcatggtgatttactggaatgtgcagacgatcgcgctgatctggcaaagtacatttgcgaaaaccaggattcaatctcttccaaattaaaggaatgctgtgaaaaacctttgttggaaaaaagtcattgtatcgctgaagtggaaaatgacgaaatgcctgccgatctgccttccttagctgccgacttcgtagaatcgaaagacgtatgtaaaaattacgccgaagctaaagacgtgtttctaggtatgtttttgtacgagtatgctagaaggcaccctgattactcagtagtccttttgctgagacttgctaaaacgtatgaaacgacgctggaaaaatgttgtgctgctgccgatccacatgagtgttacgcaaaagtttttgatgaattcaaacctctggttgaggaacctcaaaacttgattaagcaaaattgcgagctttttgaacaacttggtgaatataaattccagaatgcattgttggtaagatataccaaaaaagttccacaggtgtccactccaacattggttgaagtttcccgtaacttgggtaaggtgggttcgaagtgctgcaagcatcctgaagctaagagaatgccttgcgctgaggactatctatccgtcgttcttaaccaattatgtgttttgcacgaaaagactcccgtgagtgacagagttactaaatgttgtactgaatcattagttaacagacgtccatgtttctctgcgctcgaagttgacgagacatacgtacccaaggaattcaacgccgagacttttacttttcatgctgacatttgcacactgtcggaaaaggaacgtcagatcaaaaagcaaacagctttggtcgaacttgtgaagcataagccaaaagcaactaaagagcaattgaaagctgttatggacgattttgctgcatttgtggagaagtgttgcaaggctgatgacaaagagacatgtttcgctgaagagggtaaaaaactagtggccgcttctcaagcagctctgggtttgggcccagcagcattaaaggctgccactaatcgtaggaaaaagagagccttggatgcagcttatatctccagagccggaaatgccggtgaattagtttccccactgttgttgccgcccactcgtagacgtaggcgtagacatatccagggaccaggaccagtgctgaatttaccttcagctgctgctgctccgccggtagctagggccccagaagcggcaggaggtggttctaggtccgaggattactctagctctccacattcggctgctgccgccgcaagacctttagcagcagaagagaagcaagcacaatctttgcaaccttcctcctctagaagatcaagccattatcctgctgctgtccagagtcaggcagctgctgagaggggtgcctctgctactgccaaatctagagctatatctatcttgcagaaaaagcctagacaccaacaactccttccatccctgtcgagtttcttcttctctcacaggctcccagatatgactgccattatcaaggagatcgtcagtcgtaacaagagaagataccaagaggacggcttcgacctggatcttacatatatttacccaaacatcatagctatggggttccccgcagaaagattggaaggtgtctatagaaataatattgacgacgttgttagatttctagatagcaaacataaaaatcactacaagatatacaacctctgtgctgaaagacactacgacactgctaagttcaattgtagagtagcacagtaccccttcgaggatcataatcctccacaacttgagttgatcaaacctttttgtgaggacttggaccaatggctgtcagaggacgataatcacgtcgcagctattcattgtaaggctggaaaaggtcgaacaggagtcatgatttgtgcttatctactgcacagaggtaagtttctaaaagctcaagaggctttggatttttatggtgaagttaggactagagacaaaaagggtgttaccatccccagccagagaaggtacgtatattattacagttatctgttgaaaaaccacttagactaccgtcccgttgcactgttattccacaagatgatgtttgaaacgatcccaatgttctctggtggaacttgtaaccctcaattcgttgtttgccagttaaaggttaaaatttatagctccaattcaggacccacaagacgggaagataaatttatgtactttgaatttccacaaccattgccagtctgtggtgatattaaggtagagtttttccataagcaaaacaaaatgttgaaaaaagacaaaatgttccacttctgggtgaataccttcttcattcctggaccagaggaaacgtccgaaaaagttgaaaacggctcattgtgtgatcaagagattgactccatctgttcaatcgagcgtgcagacaatgataaagagtacttggtgcttacattgaccaaaaatgatctggataaggctaacaaagacaaagccaatagatatttctcaccaaattttaaagttaagttgtatttcaccaagactgttgaggagccttccaatccagaagcatccagcagtacttcagttactccagacgtatctgacaatgagcctgaccattatcgttactctgatactactgactccgatcctgaaaacgaaccatttgatgaggaccagcacacccaaattacaaaagttcatcaccatcatcatcactag

SEQ ID NO: 47 - DNA, 1842 bp, synthetic construct
  source 1..1842: mol_type = other DNA
atgagatttccttcaatttttactgctgttttattcgcagcatcctccgcattagctgctccagtcaacactacaacagaagatgaattagaaggggatttcgatgttgctgttttgccattttccgccagcattgctgctaaagaagaaggggtatctctcgagaaaagaatgtctgagtcgccagtgactatctccagagccggaaatgccggtgaattagtttccccactgttgttgccgcccactcgtagacgtaggcgtagacatatccagggaccaggaccagtgctgaatttaccttcagctgctgctgctccgccggtagctagggccccagaagcggcaggaggtggttctaggtccgaggattactctagctctccacattcggctgctgccgccgcaagacctttagcagcagaagagaagcaagcacaatctttgcaaccttcctcctctagaagatcaagccattatcctgctgctgtccagagtcaggcagctgctgagaggggtgcctctgctactgccaaatctagagctatatctatcttgcagaaaaagcctagacaccaacaactccttccatccctgtcgagtttcttcttctctcacaggctcccagatatgactgccattatcaaggagatcgtcagtcgtaacaagagaagataccaagaggacggcttcgacctggatcttacatatatttacccaaacatcatagctatggggttccccgcagaaagattggaaggtgtctatagaaataatattgacgacgttgttagatttctagatagcaaacataaaaatcactacaagatatacaacctctgtgctgaaagacactacgacactgctaagttcaattgtagagtagcacagtaccccttcgaggatcataatcctccacaacttgagttgatcaaacctttttgtgaggacttggaccaatggctgtcagaggacgataatcacgtcgcagctattcattgtaaggctggaaaaggtcgaacaggagtcatgatttgtgcttatctactgcacagaggtaagtttctaaaagctcaagaggctttggatttttatggtgaagttaggactagagacaaaaagggtgttaccatccccagccagagaaggtacgtatattattacagttatctgttgaaaaaccacttagactaccgtcccgttgcactgttattccacaagatgatgtttgaaacgatcccaatgttctctggtggaacttgtaaccctcaattcgttgtttgccagttaaaggttaaaatttatagctccaattcaggacccacaagacgggaagataaatttatgtactttgaatttccacaaccattgccagtctgtggtgatattaaggtagagtttttccataagcaaaacaaaatgttgaaaaaagacaaaatgttccacttctgggtgaataccttcttcattcctggaccagaggaaacgtccgaaaaagttgaaaacggctcattgtgtgatcaagagattgactccatctgttcaatcgagcgtgcagacaatgataaagagtacttggtgcttacattgaccaaaaatgatctggataaggctaacaaagacaaagccaatagatatttctcaccaaattttaaagttaagttgtatttcaccaagactgttgaggagccttccaatccagaagcatccagcagtacttcagttactccagacgtatctgacaatgagcctgaccattatcgttactctgatactactgactccgatcctgaaaacgaaccatttgatgaggaccagcacacccaaattacaaaagtttag

SEQ ID NO: 48 - protein, 21 aa, synthetic construct
GPAALKAATNRRKKRALDAAY

SEQ ID NO: 49 - protein, 747 aa, synthetic construct
MVKQIESKTAFQEALDAAGDKLVVVDFSATWCGPCKMIKPFFHSLSEKYSNVIFLEVDVDDCQDVASECEVKCMPTFQFFKKGQKVGEFSGANKEKLEATINELVHHHHHHQIFVKTLTGKTITLEVEPSDTIENVKAKIQDKEGIPPDQQRLIFAGKQLEDGRTLSDYNIQKESTLHLVLRLRGENLYFQGSESPVTISRAGNAGELVSPLLLPPTRRRRRRHIQGPGPVLNLPSAAAAPPVARAPEAAGGGSRSEDYSSSPHSAAAAARPLAAEEKQAQSLQPSSSRRSSHYPAAVQSQAAAERGASATAKSRAISILQKKPRHQQLLPSLSSFFFSHRLPDMTAIIKEIVSRNKRRYQEDGFDLDLTYIYPNIIAMGFPAERLEGVYRNNIDDVVRFLDSKHKNHYKIYNLCAERHYDTAKFNCRVAQYPFEDHNPPQLELIKPFCEDLDQWLSEDDNHVAAIHCKAGKGRTGVMICAYLLHRGKFLKAQEALDFYGEVRTRDKKGVTIPSQRRYVYYYSYLLKNHLDYRPVALLFHKMMFETIPMFSGGTCNPQFVVCQLKVKIYSSNSGPTRREDKFMYFEFPQPLPVCGDIKVEFFHKQNKMLKKDKMFHFWVNTFFIPGPEETSEKVENGSLCDQEIDSICSIERADNDKEYLVLTLTKNDLDKANKDKANRYFSPNFKVKLYFTKTVEEPSNPEASSSTSVTPDVSDNEPDHYRYSDTTDSDPENEPFDEDQHTQITKV

SEQ ID NO: 50 - protein, 1158 aa, synthetic construct
MKWVTFISLLFLFSSAYSRGVFRRDAHKSEVAHRFKDLGEENFKALVLIAFAQYLQQCPFEDHVKLVNEVTEFAKTCVADESAENCDKSLHTLFGDKLCTVATLRETYGEMADCCAKQEPERNECFLQHKDDNPNLPRLVRPEVDVMCTAFHDNEETFLKKYLYEIARRHPYFYAPELLFFAKRYKAAFTECCQAADKAACLLPKLDELRDEGKASSAKQRLKCASLQKFGERAFKAWAVARLSQRFPKAEFAEVSKLVTDLTKVHTECCHGDLLECADDRADLAKYICENQDSISSKLKECCEKPLLEKSHCIAEVENDEMPADLPSLAADFVESKDVCKNYAEAKDVFLGMFLYEYARRHPDYSVVLLLRLAKTYETTLEKCCAAADPHECYAKVFDEFKPLVEEPQNLIKQNCELFEQLGEYKFQNALLVRYTKKVPQVSTPTLVEVSRNLGKVGSKCCKHPEAKRMPCAEDYLSVVLNQLCVLHEKTPVSDRVTKCCTESLVNRRPCFSALEVDETYVPKEFNAETFTFHADICTLSEKERQIKKQTALVELVKHKPKATKEQLKAVMDDFAAFVEKCCKADDKETCFAEEGKKLVAASQAALGLISRAGNAGELVSPLLLPPTHIQGPGPVLNLPSAAAAPPVARAPEAAGGGSRSEDYSSSPHSAAAAARPLAAEEKQAQSLQPSSSRRSSHYPAAVQSQAAAERGASATAKSRAISILQKKPRHQQLLPSLSSFFFSHRLPDMTAIIKEIVSRNKRRYQEDGFDLDLTYIYPNIIAMGFPAERLEGVYRNNIDDVVRFLDSKHKNHYKIYNLCAERHYDTAKFNCRVAQYPFEDHNPPQLELIKPFCEDLDQWLSEDDNHVAAIHCKAGKGRTGVMICAYLLHRGKFLKAQEALDFYGEVRTRDKKGVTIPSQRRYVYYYSYLLKNHLDYRPVALLFHKMMFETIPMFSGGTCNPQFVVCQLKVKIYSSNSGPTRREDKFMYFEFPQPLPVCGDIKVEFFHKQNKMLKKDKMFHFWVNTFFIPGPEETSEKVENGSLCDQEIDSICSIERADNDKEYLVLTLTKNDLDKANKDKANRYFSPNFKVKLYFTKTVEEPSNPEASSSTSVTPDVSDNEPDHYRYSDTTDSDPENEPFDEDQHTQITKVHHHHHH

SEQ ID NO: 51 - protein, 37 aa, synthetic construct
LPPTRRRRRRHIQGPGPVLNLPSAAAAPPVARAPEAA

SEQ ID NO: 52 - protein, 94 aa, synthetic construct
GGGSRSEDYSSSPHSAAAAARPLAAEEKQAQSLQPSSSRRSSHYPAAVQSQAAAERGASATAKSRAISILQKKPRHQQLLPSLSSFFFSHRLPD

SEQ ID NO: 53 - protein, 16 aa, synthetic construct
PPTRRRRRRHIQGPGP

SEQ ID NO: 54 - DNA, 3558 bp, synthetic construct
  source 1..3558: mol_type = other DNA
gaattcccgccgccaccatgaaatgggtcacctttatcagcctgctgttcctgttcagcagcgcctacagcagaggcgtgttcagaagagatgcccacaagagcgaggtggcccacagattcaaggacctgggcgaagagaacttcaaggccctggtgctgatcgccttcgctcagtacctgcagcagtgcccctttgaggaccacgtgaagctggtcaacgaagtgaccgagttcgccaagacctgcgtggccgatgagagcgccgagaactgtgataagagcctgcacaccctgttcggcgacaagctgtgtacagtggccacactgagagaaacctacggcgagatggccgactgctgcgccaagcaagagcccgagagaaacgagtgcttcctgcagcacaaggacgacaaccccaacctgcctagactcgtgcggcctgaagtggacgtgatgtgcaccgccttccacgacaacgaggaaaccttcctgaagaagtacctgtacgagatcgccagacggcacccctacttttacgcccctgagctgctgttcttcgccaagcggtataaggccgccttcaccgagtgttgtcaggccgctgataaggctgcctgcctgctgcctaagctggacgagcttagagatgagggcaaagccagctccgccaagcagagactgaagtgtgccagcctgcagaagttcggcgagagagcctttaaggcctgggccgttgctagactgagccagagatttcccaaggccgagtttgccgaggtgtccaagctcgtgaccgacctgacaaaggtgcacaccgaatgctgccacggcgacctgctggaatgcgccgatgatagagccgacctggccaagtacatctgcgagaaccaggacagcatcagcagcaagctgaaagagtgctgcgagaagccactgctggaaaagagccactgtatcgccgaggtggaaaacgacgagatgcccgccgatctgccttctctggccgccgattttgtggaaagcaaggacgtgtgcaagaactacgccgaggccaaggatgtgttcctgggcatgtttctgtatgagtacgcccgcagacaccccgactactctgttgtgctgctgctgagactggccaaaacctacgagacaaccctggaaaagtgctgtgccgccgctgatcctcacgagtgttacgccaaggtgttcgacgagttcaagcctctggtggaagaaccccagaacctgatcaagcagaactgcgagctgttcgagcagctgggcgagtacaagttccagaacgccctgctcgtgcggtacaccaagaaggtgccccaggtttccacacctacactggttgaggtgtcccggaacctgggcaaagtgggcagcaagtgttgcaagcaccctgaggccaagagaatgccctgcgccgaggattacctgagcgtggtgctgaatcagctgtgcgtgctgcacgagaaaacccctgtgtccgacagagtgaccaagtgctgtaccgagagcctggtcaacagacggccttgctttagcgccctcgaggtggacgagacatacgtgcccaaagagttcaacgccgagacattcaccttccacgccgacatctgtaccctgagcgagaaagagcggcagatcaagaaacagactgccctggtggaactggtcaagcacaagcccaaggccaccaaagaacagctgaaggccgtgatggacgacttcgccgccttcgtggaaaaatgctgcaaggccgacgacaaagagacatgcttcgccgaagagggcaagaaactggtggccgcttctcaggctgctctcggacttacaaaccggcggaaaaagagagccctggacgccgcctatatcagcagagctggaaatgccggcgagctggtgtctcctttgctgctgcctcctaccagacggcggagaaggcggcatatacaaggaccaggacctgtgctgaacctgccatctgctgctgcagctcctcctgtggctagagcacctgaagctgctggcggaggctctagaagcgaggactactctagcagccctcattctgctgccgctgccgctagacctctggctgccgaagaaaaacaggcccagagtctgcagcctagcagctccagaagaagcagccattatcctgccgccgtgcagtcacaggctgcagctgaaaggggagcctctgccacagccaagagcagagccatcagcatcctgcagaaaaagccccggcaccagcaactgctgccaagcctgagcagcttcttcttctctcaccggctgcctgacatgaccgccatcatcaaagaaatcgtgtctcggaacaagcggcgctaccaagaggacggcttcgacctggatctgacctacatctaccccaacatcattgccatgggcttccccgccgaaagactggaaggggtgtaccggaacaacatcgacgatgtcgtgcggttcctggactctaagcacaagaaccactacaagatctacaacctgtgcgccgagcggcactacgacaccgccaagttcaattgcagagtggcccagtatcctttcgaggatcacaaccctccacagctcgaactgattaagcccttctgcgaggacctggaccagtggctgagcgaggacgataatcacgtggccgccatccactgcaaagccggcaagggaagaaccggcgtgatgatctgtgcttacctgctgcaccggggcaagtttctgaaggcccaagaggctctggacttctacggcgaagtgcggaccagagacaagaaaggcgtgacaatccccagccagcggagatacgtgtactactacagctacctgctgaagaaccacctggactacagacccgtcgctctgctgtttcacaagatgatgttcgagactatccccatgttctccggcggcacctgtaatccccagttcgtcgtgtgtcagctcaaagtgaagatctactccagcaacagcggccccaccagacgcgaggataagttcatgtacttcgagttcccacagccactgcctgtgtgcggcgatatcaaggtggaatttttccataagcagaacaagatgctgaaaaaggacaagatgttccacttctgggtcaacaccttcttcatccccggacctgaagagacaagcgagaaggtcgagaacggctccctgtgcgaccaagagatcgacagcatctgctccatcgagcgggccgacaatgacaaagaatacctggtgctcaccctgaccaagaacgatctggacaaggccaacaaggataaggccaaccggtacttcagccccaacttcaaagtcaagctgtacttcaccaagaccgtcgaggaacccagcaatccagaggccagctctagcacctctgtgacccctgacgtgtccgataacgagcccgaccactacagatacagcgacaccaccgacagcgaccccgagaacgagccttttgatgaggaccagcacacccagatcaccaaggtgcaccaccaccatcaccactgataagctt

SEQ ID NO: 55 - DNA, 3543 bp, synthetic construct
  source 1..3543: mol_type = other DNA
gaattcccgccgccaccatgaaatgggtcacctttatcagcctgctgttcctgttcagcagcgcctacagcagaggcgtgttcagaagagatgcccacaagagcgaggtggcccacagattcaaggacctgggcgaagagaacttcaaggccctggtgctgatcgccttcgctcagtacctgcagcagtgcccctttgaggaccacgtgaagctggtcaacgaagtgaccgagttcgccaagacctgcgtggccgatgagagcgccgagaactgtgataagagcctgcacaccctgttcggcgacaagctgtgtacagtggccacactgagagaaacctacggcgagatggccgactgctgcgccaagcaagagcccgagagaaacgagtgcttcctgcagcacaaggacgacaaccccaacctgcctagactcgtgcggcctgaagtggacgtgatgtgcaccgccttccacgacaacgaggaaaccttcctgaagaagtacctgtacgagatcgccagacggcacccctacttttacgcccctgagctgctgttcttcgccaagcggtataaggccgccttcaccgagtgttgtcaggccgctgataaggctgcctgcctgctgcctaagctggacgagcttagagatgagggcaaagccagctccgccaagcagagactgaagtgtgccagcctgcagaagttcggcgagagagcctttaaggcctgggccgttgctagactgagccagagatttcccaaggccgagtttgccgaggtgtccaagctcgtgaccgacctgacaaaggtgcacaccgaatgctgccacggcgacctgctggaatgcgccgatgatagagccgacctggccaagtacatctgcgagaaccaggacagcatcagcagcaagctgaaagagtgctgcgagaagccactgctggaaaagagccactgtatcgccgaggtggaaaacgacgagatgcccgccgatctgccttctctggccgccgattttgtggaaagcaaggacgtgtgcaagaactacgccgaggccaaggatgtgttcctgggcatgtttctgtatgagtacgcccgcagacaccccgactactctgttgtgctgctgctgagactggccaaaacctacgagacaaccctggaaaagtgctgtgccgccgctgatcctcacgagtgttacgccaaggtgttcgacgagttcaagcctctggtggaagaaccccagaacctgatcaagcagaactgcgagctgttcgagcagctgggcgagtacaagttccagaacgccctgctcgtgcggtacaccaagaaggtgccccaggtttccacacctacactggttgaggtgtcccggaacctgggcaaagtgggcagcaagtgttgcaagcaccctgaggccaagagaatgccctgcgccgaggattacctgagcgtggtgctgaatcagctgtgcgtgctgcacgagaaaacccctgtgtccgacagagtgaccaagtgctgtaccgagagcctggtcaacagacggccttgctttagcgccctcgaggtggacgagacatacgtgcccaaagagttcaacgccgagacattcaccttccacgccgacatctgtaccctgagcgagaaagagcggcagatcaagaaacagactgccctggtggaactggtcaagcacaagcccaaggccaccaaagaacagctgaaggccgtgatggacgacttcgccgccttcgtggaaaaatgctgcaaggccgacgacaaagagacatgcttcgccgaagagggcaagaaactggtggccgcttctcaggctgctctcggacttggacctgctgctctgaaagccgccatcagcagagctggaaatgccggcgagctggtgtctcctttgctgctgcctcctaccagacggcggagaaggcggcatatacaaggaccaggacctgtgctgaacctgccatctgctgctgcagctcctcctgtggctagagcacctgaagctgctggcggaggctctagaagcgaggactactctagcagccctcattctgctgccgctgccgctagacctctggctgccgaagaaaaacaggcccagagtctgcagcctagcagctccagaagaagcagccattatcctgccgccgtgcagtcacaggctgcagctgaaaggggagcctctgccacagccaagagcagagccatcagcatcctgcagaaaaagccccggcaccagcaactgctgccaagcctgagcagcttcttcttctctcaccggctgcctgacatgaccgccatcatcaaagaaatcgtgtctcggaacaagcggcgctaccaagaggacggcttcgacctggatctgacctacatctaccccaacatcattgccatgggcttccccgccgaaagactggaaggggtgtaccggaacaacatcgacgatgtcgtgcggttcctggactctaagcacaagaaccactacaagatctacaacctgtgcgccgagcggcactacgacaccgccaagttcaattgcagagtggcccagtatcctttcgaggatcacaaccctccacagctcgaactgattaagcccttctgcgaggacctggaccagtggctgagcgaggacgataatcacgtggccgccatccactgcaaagccggcaagggaagaaccggcgtgatgatctgtgcttacctgctgcaccggggcaagtttctgaaggcccaagaggctctggacttctacggcgaagtgcggaccagagacaagaaaggcgtgacaatccccagccagcggagatacgtgtactactacagctacctgctgaagaaccacctggactacagacccgtcgctctgctgtttcacaagatgatgttcgagactatccccatgttctccggcggcacctgtaatccccagttcgtcgtgtgtcagctcaaagtgaagatctactccagcaacagcggccccaccagacgcgaggataagttcatgtacttcgagttcccacagccactgcctgtgtgcggcgatatcaaggtggaatttttccataagcagaacaagatgctgaaaaaggacaagatgttccacttctgggtcaacaccttcttcatccccggacctgaagagacaagcgagaaggtcgagaacggctccctgtgcgaccaagagatcgacagcatctgctccatcgagcgggccgacaatgacaaagaatacctggtgctcaccctgaccaagaacgatctggacaaggccaacaaggataaggccaaccggtacttcagccccaacttcaaagtcaagctgtacttcaccaagaccgtcgaggaacccagcaatccagaggccagctctagcacctctgtgacccctgacgtgtccgataacgagcccgaccactacagatacagcgacaccaccgacagcgaccccgagaacgagccttttgatgaggaccagcacacccagatcaccaaggtgcaccaccaccatcaccactgataagctt

SEQ ID NO: 56 - DNA, 3519 bp, synthetic construct
  source 1..3519: mol_type = other DNA
gaattcccgccgccaccatgaaatgggtcacctttatcagcctgctgttcctgttcagcagcgcctacagcagaggcgtgttcagaagagatgcccacaagagcgaggtggcccacagattcaaggacctgggcgaagagaacttcaaggccctggtgctgatcgccttcgctcagtacctgcagcagtgcccctttgaggaccacgtgaagctggtcaacgaagtgaccgagttcgccaagacctgcgtggccgatgagagcgccgagaactgtgataagagcctgcacaccctgttcggcgacaagctgtgtacagtggccacactgagagaaacctacggcgagatggccgactgctgcgccaagcaagagcccgagagaaacgagtgcttcctgcagcacaaggacgacaaccccaacctgcctagactcgtgcggcctgaagtggacgtgatgtgcaccgccttccacgacaacgaggaaaccttcctgaagaagtacctgtacgagatcgccagacggcacccctacttttacgcccctgagctgctgttcttcgccaagcggtataaggccgccttcaccgagtgttgtcaggccgctgataaggctgcctgcctgctgcctaagctggacgagcttagagatgagggcaaagccagctccgccaagcagagactgaagtgtgccagcctgcagaagttcggcgagagagcctttaaggcctgggccgttgctagactgagccagagatttcccaaggccgagtttgccgaggtgtccaagctcgtgaccgacctgacaaaggtgcacaccgaatgctgccacggcgacctgctggaatgcgccgatgatagagccgacctggccaagtacatctgcgagaaccaggacagcatcagcagcaagctgaaagagtgctgcgagaagccactgctggaaaagagccactgtatcgccgaggtggaaaacgacgagatgcccgccgatctgccttctctggccgccgattttgtggaaagcaaggacgtgtgcaagaactacgccgaggccaaggatgtgttcctgggcatgtttctgtatgagtacgcccgcagacaccccgactactctgttgtgctgctgctgagactggccaaaacctacgagacaaccctggaaaagtgctgtgccgccgctgatcctcacgagtgttacgccaaggtgttcgacgagttcaagcctctggtggaagaaccccagaacctgatcaagcagaactgcgagctgttcgagcagctgggcgagtacaagttccagaacgccctgctcgtgcggtacaccaagaaggtgccccaggtttccacacctacactggttgaggtgtcccggaacctgggcaaagtgggcagcaagtgttgcaagcaccctgaggccaagagaatgccctgcgccgaggattacctgagcgtggtgctgaatcagctgtgcgtgctgcacgagaaaacccctgtgtccgacagagtgaccaagtgctgtaccgagagcctggtcaacagacggccttgctttagcgccctcgaggtggacgagacatacgtgcccaaagagttcaacgccgagacattcaccttccacgccgacatctgtaccctgagcgagaaagagcggcagatcaagaaacagactgccctggtggaactggtcaagcacaagcccaaggccaccaaagaacagctgaaggccgtgatggacgacttcgccgccttcgtggaaaaatgctgcaaggccgacgacaaagagacatgcttcgccgaagagggcaagaaactggtggccgcttctcaggctgctctcggacttatcagcagagctggaaatgccggcgagctggtgtctcctttgctgctgcctcctaccagacggcggagaaggcggcatatacaaggaccaggacctgtgctgaacctgccatctgctgctgcagctcctcctgtggctagagcacctgaagctgctggcggaggctctagaagcgaggactactctagcagccctcattctgctgccgctgccgctagacctctggctgccgaagaaaaacaggcccagagtctgcagcctagcagctccagaagaagcagccattatcctgccgccgtgcagtcacaggctgcagctgaaaggggagcctctgccacagccaagagcagagccatcagcatcctgcagaaaaagccccggcaccagcaactgctgccaagcctgagcagcttcttcttctctcaccggctgcctgacatgaccgccatcatcaaagaaatcgtgtctcggaacaagcggcgctaccaagaggacggcttcgacctggatctgacctacatctaccccaacatcattgccatgggcttccccgccgaaagactggaaggggtgtaccggaacaacatcgacgatgtcgtgcggttcctggactctaagcacaagaaccactacaagatctacaacctgtgcgccgagcggcactacgacaccgccaagttcaattgcagagtggcccagtatcctttcgaggatcacaaccctccacagctcgaactgattaagcccttctgcgaggacctggaccagtggctgagcgaggacgataatcacgtggccgccatccactgcaaagccggcaagggaagaaccggcgtgatgatctgtgcttacctgctgcaccggggcaagtttctgaaggcccaagaggctctggacttctacggcgaagtgcggaccagagacaagaaaggcgtgacaatccccagccagcggagatacgtgtactactacagctacctgctgaagaaccacctggactacagacccgtcgctctgctgtttcacaagatgatgttcgagactatccccatgttctccggcggcacctgtaatccccagttcgtcgtgtgtcagctcaaagtgaagatctactccagcaacagcggccccaccagacgcgaggataagttcatgtacttcgagttcccacagccactgcctgtgtgcggcgatatcaaggtggaatttttccataagcagaacaagatgctgaaaaaggacaagatgttccacttctgggtcaacaccttcttcatccccggacctgaagagacaagcgagaaggtcgagaacggctccctgtgcgaccaagagatcgacagcatctgctccatcgagcgggccgacaatgacaaagaatacctggtgctcaccctgaccaagaacgatctggacaaggccaacaaggataaggccaaccggtacttcagccccaacttcaaagtcaagctgtacttcaccaagaccgtcgaggaacccagcaatccagaggccagctctagcacctctgtgacccctgacgtgtccgataacgagcccgaccactacagatacagcgacaccaccgacagcgaccccgagaacgagccttttgatgaggaccagcacacccagatcaccaaggtgcaccaccaccatcaccactgataagctt

SEQ ID NO: 57 - DNA, 3582 bp, synthetic construct
  source 1..3582: mol_type = other DNA
gaattcccgccgccaccatgaaatgggtcacctttatcagcctgctgttcctgttcagcagcgcctacagcagaggcgtgttcagaagagatgcccacaagagcgaggtggcccacagattcaaggacctgggcgaagagaacttcaaggccctggtgctgatcgccttcgctcagtacctgcagcagtgcccctttgaggaccacgtgaagctggtcaacgaagtgaccgagttcgccaagacctgcgtggccgatgagagcgccgagaactgtgataagagcctgcacaccctgttcggcgacaagctgtgtacagtggccacactgagagaaacctacggcgagatggccgactgctgcgccaagcaagagcccgagagaaacgagtgcttcctgcagcacaaggacgacaaccccaacctgcctagactcgtgcggcctgaagtggacgtgatgtgcaccgccttccacgacaacgaggaaaccttcctgaagaagtacctgtacgagatcgccagacggcacccctacttttacgcccctgagctgctgttcttcgccaagcggtataaggccgccttcaccgagtgttgtcaggccgctgataaggctgcctgcctgctgcctaagctggacgagcttagagatgagggcaaagccagctccgccaagcagagactgaagtgtgccagcctgcagaagttcggcgagagagcctttaaggcctgggccgttgctagactgagccagagatttcccaaggccgagtttgccgaggtgtccaagctcgtgaccgacctgacaaaggtgcacaccgaatgctgccacggcgacctgctggaatgcgccgatgatagagccgacctggccaagtacatctgcgagaaccaggacagcatcagcagcaagctgaaagagtgctgcgagaagccactgctggaaaagagccactgtatcgccgaggtggaaaacgacgagatgcccgccgatctgccttctctggccgccgattttgtggaaagcaaggacgtgtgcaagaactacgccgaggccaaggatgtgttcctgggcatgtttctgtatgagtacgcccgcagacaccccgactactctgttgtgctgctgctgagactggccaaaacctacgagacaaccctggaaaagtgctgtgccgccgctgatcctcacgagtgttacgccaaggtgttcgacgagttcaagcctctggtggaagaaccccagaacctgatcaagcagaactgcgagctgttcgagcagctgggcgagtacaagttccagaacgccctgctcgtgcggtacaccaagaaggtgccccaggtttccacacctacactggttgaggtgtcccggaacctgggcaaagtgggcagcaagtgttgcaagcaccctgaggccaagagaatgccctgcgccgaggattacctgagcgtggtgctgaatcagctgtgcgtgctgcacgagaaaacccctgtgtccgacagagtgaccaagtgctgtaccgagagcctggtcaacagacggccttgctttagcgccctcgaggtggacgagacatacgtgcccaaagagttcaacgccgagacattcaccttccacgccgacatctgtaccctgagcgagaaagagcggcagatcaagaaacagactgccctggtggaactggtcaagcacaagcccaaggccaccaaagaacagctgaaggccgtgatggacgacttcgccgccttcgtggaaaaatgctgcaaggccgacgacaaagagacatgcttcgccgaagagggcaagaaactggtggccgcttctcaggctgctctcggacttggacctgctgctctgaaagccgccacaaaccggcggaaaaagagagccctggacgccgcctatatcagcagagctggaaatgccggcgagctggtgtctcctttgctgctgcctcctaccagacggcggagaaggcggcatatacaaggaccaggacctgtgctgaacctgccatctgctgctgcagctcctcctgtggctagagcacctgaagctgctggcggaggctctagaagcgaggactactctagcagccctcattctgctgccgctgccgctagacctctggctgccgaagaaaaacaggcccagagtctgcagcctagcagctccagaagaagcagccattatcctgccgccgtgcagtcacaggctgcagctgaaaggggagcctctgccacagccaagagcagagccatcagcatcctgcagaaaaagccccggcaccagcaactgctgccaagcctgagcagcttcttcttctctcaccggctgcctgacatgaccgccatcatcaaagaaatcgtgtctcggaacaagcggcgctaccaagaggacggcttcgacctggatctgacctacatctaccccaacatcattgccatgggcttccccgccgaaagactggaaggggtgtaccggaacaacatcgacgatgtcgtgcggttcctggactctaagcacaagaaccactacaagatctacaacctgtgcgccgagcggcactacgacaccgccaagttcaattgcagagtggcccagtatcctttcgaggatcacaaccctccacagctcgaactgattaagcccttctgcgaggacctggaccagtggctgagcgaggacgataatcacgtggccgccatccactgcaaagccggcaagggaagaaccggcgtgatgatctgtgcttacctgctgcaccggggcaagtttctgaaggcccaagaggctctggacttctacggcgaagtgcggaccagagacaagaaaggcgtgacaatccccagccagcggagatacgtgtactactacagctacctgctgaagaaccacctggactacagacccgtcgctctgctgtttcacaagatgatgttcgagactatccccatgttctccggcggcacctgtaatccccagttcgtcgtgtgtcagctcaaagtgaagatctactccagcaacagcggccccaccagacgcgaggataagttcatgtacttcgagttcccacagccactgcctgtgtgcggcgatatcaaggtggaatttttccataagcagaacaagatgctgaaaaaggacaagatgttccacttctgggtcaacaccttcttcatccccggacctgaagagacaagcgagaaggtcgagaacggctccctgtgcgaccaagagatcgacagcatctgctccatcgagcgggccgacaatgacaaagaatacctggtgctcaccctgaccaagaacgatctggacaaggccaacaaggataaggccaaccggtacttcagccccaacttcaaagtcaagctgtacttcaccaagaccgtcgaggaacccagcaatccagaggccagctctagcacctctgtgacccctgacgtgtccgataacgagcccgaccactacagatacagcgacaccaccgacagcgaccccgagaacgagccttttgatgaggaccagcacacccagatcaccaaggtgcaccaccaccatcaccactgataagctt

SEQ ID NO: 58 - DNA, 3099 bp, synthetic construct
  source 1..3099: mol_type = other DNA
gaattcccgccgccaccatgaaatgggtcacctttatcagcctgctgttcctgttcagcagcgcctacagcagaggcgtgttcagaagagatgcccacaagagcgaggtggcccacagattcaaggacctgggcgaagagaacttcaaggccctggtgctgatcgccttcgctcagtacctgcagcagtgcccctttgaggaccacgtgaagctggtcaacgaagtgaccgagttcgccaagacctgcgtggccgatgagagcgccgagaactgtgataagagcctgcacaccctgttcggcgacaagctgtgtacagtggccacactgagagaaacctacggcgagatggccgactgctgcgccaagcaagagcccgagagaaacgagtgcttcctgcagcacaaggacgacaaccccaacctgcctagactcgtgcggcctgaagtggacgtgatgtgcaccgccttccacgacaacgaggaaaccttcctgaagaagtacctgtacgagatcgccagacggcacccctacttttacgcccctgagctgctgttcttcgccaagcggtataaggccgccttcaccgagtgttgtcaggccgctgataaggctgcctgcctgctgcctaagctggacgagcttagagatgagggcaaagccagctccgccaagcagagactgaagtgtgccagcctgcagaagttcggcgagagagcctttaaggcctgggccgttgctagactgagccagagatttcccaaggccgagtttgccgaggtgtccaagctcgtgaccgacctgacaaaggtgcacaccgaatgctgccacggcgacctgctggaatgcgccgatgatagagccgacctggccaagtacatctgcgagaaccaggacagcatcagcagcaagctgaaagagtgctgcgagaagccactgctggaaaagagccactgtatcgccgaggtggaaaacgacgagatgcccgccgatctgccttctctggccgccgattttgtggaaagcaaggacgtgtgcaagaactacgccgaggccaaggatgtgttcctgggcatgtttctgtatgagtacgcccgcagacaccccgactactctgttgtgctgctgctgagactggccaaaacctacgagacaaccctggaaaagtgctgtgccgccgctgatcctcacgagtgttacgccaaggtgttcgacgagttcaagcctctggtggaagaaccccagaacctgatcaagcagaactgcgagctgttcgagcagctgggcgagtacaagttccagaacgccctgctcgtgcggtacaccaagaaggtgccccaggtttccacacctacactggttgaggtgtcccggaacctgggcaaagtgggcagcaagtgttgcaagcaccctgaggccaagagaatgccctgcgccgaggattacctgagcgtggtgctgaatcagctgtgcgtgctgcacgagaaaacccctgtgtccgacagagtgaccaagtgctgtaccgagagcctggtcaacagacggccttgctttagcgccctcgaggtggacgagacatacgtgcccaaagagttcaacgccgagacattcaccttccacgccgacatctgtaccctgagcgagaaagagcggcagatcaagaaacagactgccctggtggaactggtcaagcacaagcccaaggccaccaaagaacagctgaaggccgtgatggacgacttcgccgccttcgtggaaaaatgctgcaaggccgacgacaaagagacatgcttcgccgaagagggcaagaaactggtggccgcttctcaggctgctctcggacttatgaccgccatcatcaaagaaatcgtgtctcggaacaagcggcgctaccaagaggacggcttcgacctggatctgacctacatctaccccaacatcattgccatgggcttccccgccgaaagactggaaggggtgtaccggaacaacatcgacgatgtcgtgcggttcctggactctaagcacaagaaccactacaagatctacaacctgtgcgccgagcggcactacgacaccgccaagttcaattgcagagtggcccagtatcctttcgaggatcacaaccctccacagctcgaactgattaagcccttctgcgaggacctggaccagtggctgagcgaggacgataatcacgtggccgccatccactgcaaagccggcaagggaagaaccggcgtgatgatctgtgcttacctgctgcaccggggcaagtttctgaaggcccaagaggctctggacttctacggcgaagtgcggaccagagacaagaaaggcgtgacaatccccagccagcggagatacgtgtactactacagctacctgctgaagaaccacctggactacagacccgtcgctctgctgtttcacaagatgatgttcgagactatccccatgttctccggcggcacctgtaatccccagttcgtcgtgtgtcagctcaaagtgaagatctactccagcaacagcggccccaccagacgcgaggataagttcatgtacttcgagttcccacagccactgcctgtgtgcggcgatatcaaggtggaatttttccataagcagaacaagatgctgaaaaaggacaagatgttccacttctgggtcaacaccttcttcatccccggacctgaagagacaagcgagaaggtcgagaacggctccctgtgcgaccaagagatcgacagcatctgctccatcgagcgggccgacaatgacaaagaatacctggtgctcaccctgaccaagaacgatctggacaaggccaacaaggataaggccaaccggtacttcagccccaacttcaaagtcaagctgtacttcaccaagaccgtcgaggaacccagcaatccagaggccagctctagcacctctgtgacccctgacgtgtccgataacgagcccgaccactacagatacagcgacaccaccgacagcgaccccgagaacgagccttttgatgaggaccagcacacccagatcaccaaggtgtacccgtatgacgtgccggattatgcgtgctgataagcttaagctt

SEQ ID NO: 59 - DNA, 3087 bp, synthetic construct
  source 1..3087: mol_type = other DNA
gaattcccgccgccaccatgaagtgggtcacctttattagtctgctgtttctgttttcttccgcttactcacgaggggtctttaggagagatgctcacaaatcagaggtggcccaccggtttaaggacctgggcgaggagaacttcaaggccctggtgctgatcgcctttgcccagtatctgcagcagtgccccttcgaggatcacgtgaagctggtgaatgaggtgaccgagtttgccaagacatgcgtggccgacgagtctgccgagaactgtgataagagcctgcacaccctgttcggcgacaagctgtgcaccgtggccacactgcgggagacatacggcgagatggccgattgctgtgccaagcaggagcccgagagaaatgagtgctttctgcagcacaaggacgataacccaaatctgccaaggctggtgcgccctgaggtggacgtgatgtgcaccgcctttcacgataacgaggagacattcctgaagaagtatctgtacgagatcgcccggagacacccatatttctacgcccccgagctgctgttctttgccaagagatataaggccgcctttaccgagtgctgtcaggcagcagacaaggcagcatgcctgctgcctaagctggacgagctgagggatgagggcaaggccagctccgccaagcagcgcctgaagtgtgccagcctgcagaagtttggcgagagggccttcaaggcctgggcagtggcaaggctgtctcagagatttccaaaggccgagttcgccgaggtgagcaagctggtgaccgatctgacaaaggtgcacaccgagtgctgtcacggcgacctgctggagtgcgcagacgatagagccgatctggccaagtacatctgtgagaaccaggacagcatctctagcaagctgaaggagtgctgtgagaagcccctgctggagaagtcccactgcatcgccgaggtggagaatgacgagatgccagcagatctgccttctctggcagcagacttcgtggagagcaaggacgtgtgcaagaactatgccgaggccaaggacgtgttcctgggcatgttcctgtatgagtacgccaggcgccacccagactattccgtggtgctgctgctgcggctggccaagacctacgagacaaccctggagaagtgctgtgcagcagccgatccccacgagtgctacgcaaaggtgtttgacgagttcaagcctctggtggaggagccacagaacctgatcaagcagaattgtgagctgttcgagcagctgggcgagtataagtttcagaatgccctgctggtgagatacaccaagaaggtgccccaggtgtccacccctacactggtggaggtgtctaggaacctgggcaaggtcggcagcaagtgctgtaagcacccagaggcaaagaggatgccatgcgcagaggactatctgtccgtggtgctgaatcagctgtgcgtgctgcacgagaagaccccagtgtctgatagggtgaccaagtgctgtacagagtccctggtgaatagacggccctgcttctctgccctggaggtggacgagacatacgtgcctaaggagtttaacgccgagacattcaccttccacgccgatatctgtaccctgagcgagaaggagcgccagatcaagaagcagacagccctggtggagctggtgaagcacaagcccaaggccaccaaggagcagctgaaggccgtgatggacgattttgccgccttcgtggagaagtgctgtaaggccgacgataaggagacatgcttcgcagaggagggcaagaagctggtggcagcatcccaggccgccctgggcctgatgaccgccatcatcaaggagatcgtgagccgcaataagaggcgctatcaggaggatggcttcgacctggatctgacatatatctacccaaacatcatcgccatgggatttccagcagagaggctggagggcgtgtacaggaacaatatcgacgatgtggtgaggttcctggactccaagcacaagaaccactataagatctacaatctgtgcgccgagcggcactatgataccgccaagttcaactgtagagtggcccagtacccatttgaggaccacaatccaccccagctggagctgatcaagcccttttgcgaggacctggatcagtggctgagcgaggacgataatcacgtggcagcaatccactgcaaggcaggcaagggaaggacaggcgtgatgatctgtgcctatctgctgcacaggggcaagttcctgaaggcccaggaggccctggacttttacggcgaggtgcggaccagagataagaagggcgtgacaatccctagccagcggcggtacgtgtactattactcctacctgctgaagaaccacctggactaccgcccagtggccctgctgtttcacaagatgatgttcgagacaatccctatgttctccggcggcacatgcaacccacagtttgtggtgtgccagctgaaggtgaagatctatagctccaattctggccccaccaggcgcgaggataagttcatgtactttgagttcccccagcctctgccagtgtgcggcgacatcaaggtggagtttttccacaagcagaacaagatgctgaagaaggataagatgtttcacttctgggtgaatacctttttcatccccggccctgaggagacaagcgagaaggtggagaatggctccctgtgcgaccaggagatcgattctatctgtagcatcgagagggccgacaacgataaggagtacctggtgctgaccctgacaaagaatgacctggataaggccaacaaggacaaggccaatcgctatttttctcccaacttcaaggtgaagctgtacttcaccaagacagtggaggagcctagcaatccagaggcctctagctccaccagcgtgacacccgacgtgtccgataacgagcctgaccactatcggtactccgataccacagactctgatcctgagaacgagccatttgacgaagaccagcatactcagattactaaagtccaccatcatcaccaccactaataagcttggatcc

SEQ ID NO: 60 - DNA, 3126 bp, synthetic construct
  source 1..3126: mol_type = other DNA
gaattcccgccgccaccatgaagtgggtcacctttattagtctgctgtttctgttttcttccgcttactcacgaggggtctttaggagagatgctcacaaatcagaggtggcccaccggtttaaggacctgggcgaggagaacttcaaggccctggtgctgatcgcctttgcccagtatctgcagcagtgccccttcgaggatcacgtgaagctggtgaatgaggtgaccgagtttgccaagacatgcgtggccgacgagtctgccgagaactgtgataagagcctgcacaccctgttcggcgacaagctgtgcaccgtggccacactgcgggagacatacggcgagatggccgattgctgtgccaagcaggagcccgagagaaatgagtgctttctgcagcacaaggacgataacccaaatctgccaaggctggtgcgccctgaggtggacgtgatgtgcaccgcctttcacgataacgaggagacattcctgaagaagtatctgtacgagatcgcccggagacacccatatttctacgcccccgagctgctgttctttgccaagagatataaggccgcctttaccgagtgctgtcaggcagcagacaaggcagcatgcctgctgcctaagctggacgagctgagggatgagggcaaggccagctccgccaagcagcgcctgaagtgtgccagcctgcagaagtttggcgagagggccttcaaggcctgggcagtggcaaggctgtctcagagatttccaaaggccgagttcgccgaggtgagcaagctggtgaccgatctgacaaaggtgcacaccgagtgctgtcacggcgacctgctggagtgcgcagacgatagagccgatctggccaagtacatctgtgagaaccaggacagcatctctagcaagctgaaggagtgctgtgagaagcccctgctggagaagtcccactgcatcgccgaggtggagaatgacgagatgccagcagatctgccttctctggcagcagacttcgtggagagcaaggacgtgtgcaagaactatgccgaggccaaggacgtgttcctgggcatgttcctgtatgagtacgccaggcgccacccagactattccgtggtgctgctgctgcggctggccaagacctacgagacaaccctggagaagtgctgtgcagcagccgatccccacgagtgctacgcaaaggtgtttgacgagttcaagcctctggtggaggagccacagaacctgatcaagcagaattgtgagctgttcgagcagctgggcgagtataagtttcagaatgccctgctggtgagatacaccaagaaggtgccccaggtgtccacccctacactggtggaggtgtctaggaacctgggcaaggtcggcagcaagtgctgtaagcacccagaggcaaagaggatgccatgcgcagaggactatctgtccgtggtgctgaatcagctgtgcgtgctgcacgagaagaccccagtgtctgatagggtgaccaagtgctgtacagagtccctggtgaatagacggccctgcttctctgccctggaggtggacgagacatacgtgcctaaggagtttaacgccgagacattcaccttccacgccgatatctgtaccctgagcgagaaggagcgccagatcaagaagcagacagccctggtggagctggtgaagcacaagcccaaggccaccaaggagcagctgaaggccgtgatggacgattttgccgccttcgtggagaagtgctgtaaggccgacgataaggagacatgcttcgcagaggagggcaagaagctggtggcagcatcccaggccgccctgggcctgaccaacaggcgcaagaagcgggccctggacgcagcatacatgaccgccatcatcaaggagatcgtgagccgcaataagaggcgctatcaggaggatggcttcgacctggatctgacatatatctacccaaacatcatcgccatgggatttccagcagagaggctggagggcgtgtacaggaacaatatcgacgatgtggtgaggttcctggactccaagcacaagaaccactataagatctacaatctgtgcgccgagcggcactatgataccgccaagttcaactgtagagtggcccagtacccatttgaggaccacaatccaccccagctggagctgatcaagcccttttgcgaggacctggatcagtggctgagcgaggacgataatcacgtggcagcaatccactgcaaggcaggcaagggaaggacaggcgtgatgatctgtgcctatctgctgcacaggggcaagttcctgaaggcccaggaggccctggacttttacggcgaggtgcggaccagagataagaagggcgtgacaatccctagccagcggcggtacgtgtactattactcctacctgctgaagaaccacctggactaccgcccagtggccctgctgtttcacaagatgatgttcgagacaatccctatgttctccggcggcacatgcaacccacagtttgtggtgtgccagctgaaggtgaagatctatagctccaattctggccccaccaggcgcgaggataagttcatgtactttgagttcccccagcctctgccagtgtgcggcgacatcaaggtggagtttttccacaagcagaacaagatgctgaagaaggataagatgtttcacttctgggtgaatacctttttcatccccggccctgaggagacaagcgagaaggtggagaatggctccctgtgcgaccaggagatcgattctatctgtagcatcgagagggccgacaacgataaggagtacctggtgctgaccctgacaaagaatgacctggataaggccaacaaggacaaggccaatcgctatttttctcccaacttcaaggtgaagctgtacttcaccaagacagtggaggagcctagcaatccagaggcctctagctccaccagcgtgacacccgacgtgtccgataacgagcctgaccactatcggtactccgataccacagactctgatcctgagaacgagccatttgacgaagaccagcatactcagattactaaagtccaccatcatcaccaccactaataagcttggatcc

SEQ ID NO: 61 - DNA, 3204 bp, synthetic construct
  source 1..3204: mol_type = other DNA
gaattcccgccgccaccatgaagtgggtcacctttattagtctgctgtttctgttttcttccgcttactcacgaggggtctttaggagagatgctcacaaatcagaggtggcccaccggtttaaggacctgggcgaggagaacttcaaggccctggtgctgatcgcctttgcccagtatctgcagcagtgccccttcgaggatcacgtgaagctggtgaatgaggtgaccgagtttgccaagacatgcgtggccgacgagtctgccgagaactgtgataagagcctgcacaccctgttcggcgacaagctgtgcaccgtggccacactgcgggagacatacggcgagatggccgattgctgtgccaagcaggagcccgagagaaatgagtgctttctgcagcacaaggacgataacccaaatctgccaaggctggtgcgccctgaggtggacgtgatgtgcaccgcctttcacgataacgaggagacattcctgaagaagtatctgtacgagatcgcccggagacacccatatttctacgcccccgagctgctgttctttgccaagagatataaggccgcctttaccgagtgctgtcaggcagcagacaaggcagcatgcctgctgcctaagctggacgagctgagggatgagggcaaggccagctccgccaagcagcgcctgaagtgtgccagcctgcagaagtttggcgagagggccttcaaggcctgggcagtggcaaggctgtctcagagatttccaaaggccgagttcgccgaggtgagcaagctggtgaccgatctgacaaaggtgcacaccgagtgctgtcacggcgacctgctggagtgcgcagacgatagagccgatctggccaagtacatctgtgagaaccaggacagcatctctagcaagctgaaggagtgctgtgagaagcccctgctggagaagtcccactgcatcgccgaggtggagaatgacgagatgccagcagatctgccttctctggcagcagacttcgtggagagcaaggacgtgtgcaagaactatgccgaggccaaggacgtgttcctgggcatgttcctgtatgagtacgccaggcgccacccagactattccgtggtgctgctgctgcggctggccaagacctacgagacaaccctggagaagtgctgtgcagcagccgatccccacgagtgctacgcaaaggtgtttgacgagttcaagcctctggtggaggagccacagaacctgatcaagcagaattgtgagctgttcgagcagctgggcgagtataagtttcagaatgccctgctggtgagatacaccaagaaggtgccccaggtgtccacccctacactggtggaggtgtctaggaacctgggcaaggtcggcagcaagtgctgtaagcacccagaggcaaagaggatgccatgcgcagaggactatctgtccgtggtgctgaatcagctgtgcgtgctgcacgagaagaccccagtgtctgatagggtgaccaagtgctgtacagagtccctggtgaatagacggccctgcttctctgccctggaggtggacgagacatacgtgcctaaggagtttaacgccgagacattcaccttccacgccgatatctgtaccctgagcgagaaggagcgccagatcaagaagcagacagccctggtggagctggtgaagcacaagcccaaggccaccaaggagcagctgaaggccgtgatggacgattttgccgccttcgtggagaagtgctgtaaggccgacgataaggagacatgcttcgcagaggagggcaagaagctggtggcagcatcccaggccgccctgggcctgccacctacacggagaaggcgccggagacacatccagggacctggaccaaagaagcctagacaccagcagctgctgccatccctgtcctctttctttttctctcacaggctgcctgacatgaccgccatcatcaaggagatcgtgagccgcaataagaggcgctatcaggaggatggcttcgacctggatctgacatatatctacccaaacatcatcgccatgggatttccagcagagaggctggagggcgtgtacaggaacaatatcgacgatgtggtgaggttcctggactccaagcacaagaaccactataagatctacaatctgtgcgccgagcggcactatgataccgccaagttcaactgtagagtggcccagtacccatttgaggaccacaatccaccccagctggagctgatcaagcccttttgcgaggacctggatcagtggctgagcgaggacgataatcacgtggcagcaatccactgcaaggcaggcaagggaaggacaggcgtgatgatctgtgcctatctgctgcacaggggcaagttcctgaaggcccaggaggccctggacttttacggcgaggtgcggaccagagataagaagggcgtgacaatccctagccagcggcggtacgtgtactattactcctacctgctgaagaaccacctggactaccgcccagtggccctgctgtttcacaagatgatgttcgagacaatccctatgttctccggcggcacatgcaacccacagtttgtggtgtgccagctgaaggtgaagatctatagctccaattctggccccaccaggcgcgaggataagttcatgtactttgagttcccccagcctctgccagtgtgcggcgacatcaaggtggagtttttccacaagcagaacaagatgctgaagaaggataagatgtttcacttctgggtgaatacctttttcatccccggccctgaggagacaagcgagaaggtggagaatggctccctgtgcgaccaggagatcgattctatctgtagcatcgagagggccgacaacgataaggagtacctggtgctgaccctgacaaagaatgacctggataaggccaacaaggacaaggccaatcgctatttttctcccaacttcaaggtgaagctgtacttcaccaagacagtggaggagcctagcaatccagaggcctctagctccaccagcgtgacacccgacgtgtccgataacgagcctgaccactatcggtactccgataccacagactctgatcctgagaacgagccatttgacgaagaccagcatactcagattactaaagtccaccatcatcaccaccactaataagcttggatcc

SEQ ID NO: 62 - DNA, 3243 bp, synthetic construct
  source 1..3243: mol_type = other DNA
gaattcccgccgccaccatgaagtgggtcacctttattagtctgctgtttctgttttcttccgcttactcacgaggggtctttaggagagatgctcacaaatcagaggtggcccaccggtttaaggacctgggcgaggagaacttcaaggccctggtgctgatcgcctttgcccagtatctgcagcagtgccccttcgaggatcacgtgaagctggtgaatgaggtgaccgagtttgccaagacatgcgtggccgacgagtctgccgagaactgtgataagagcctgcacaccctgttcggcgacaagctgtgcaccgtggccacactgcgggagacatacggcgagatggccgattgctgtgccaagcaggagcccgagagaaatgagtgctttctgcagcacaaggacgataacccaaatctgccaaggctggtgcgccctgaggtggacgtgatgtgcaccgcctttcacgataacgaggagacattcctgaagaagtatctgtacgagatcgcccggagacacccatatttctacgcccccgagctgctgttctttgccaagagatataaggccgcctttaccgagtgctgtcaggcagcagacaaggcagcatgcctgctgcctaagctggacgagctgagggatgagggcaaggccagctccgccaagcagcgcctgaagtgtgccagcctgcagaagtttggcgagagggccttcaaggcctgggcagtggcaaggctgtctcagagatttccaaaggccgagttcgccgaggtgagcaagctggtgaccgatctgacaaaggtgcacaccgagtgctgtcacggcgacctgctggagtgcgcagacgatagagccgatctggccaagtacatctgtgagaaccaggacagcatctctagcaagctgaaggagtgctgtgagaagcccctgctggagaagtcccactgcatcgccgaggtggagaatgacgagatgccagcagatctgccttctctggcagcagacttcgtggagagcaaggacgtgtgcaagaactatgccgaggccaaggacgtgttcctgggcatgttcctgtatgagtacgccaggcgccacccagactattccgtggtgctgctgctgcggctggccaagacctacgagacaaccctggagaagtgctgtgcagcagccgatccccacgagtgctacgcaaaggtgtttgacgagttcaagcctctggtggaggagccacagaacctgatcaagcagaattgtgagctgttcgagcagctgggcgagtataagtttcagaatgccctgctggtgagatacaccaagaaggtgccccaggtgtccacccctacactggtggaggtgtctaggaacctgggcaaggtcggcagcaagtgctgtaagcacccagaggcaaagaggatgccatgcgcagaggactatctgtccgtggtgctgaatcagctgtgcgtgctgcacgagaagaccccagtgtctgatagggtgaccaagtgctgtacagagtccctggtgaatagacggccctgcttctctgccctggaggtggacgagacatacgtgcctaaggagtttaacgccgagacattcaccttccacgccgatatctgtaccctgagcgagaaggagcgccagatcaagaagcagacagccctggtggagctggtgaagcacaagcccaaggccaccaaggagcagctgaaggccgtgatggacgattttgccgccttcgtggagaagtgctgtaaggccgacgataaggagacatgcttcgcagaggagggcaagaagctggtggcagcatcccaggccgccctgggcctgaccaacaggcgcaagaagcgggccctggacgcagcatacccacctacacggagaaggcgccggagacacatccagggacctggaccaaagaagcctagacaccagcagctgctgccatccctgtcctctttctttttctctcacaggctgcctgacatgaccgccatcatcaaggagatcgtgagccgcaataagaggcgctatcaggaggatggcttcgacctggatctgacatatatctacccaaacatcatcgccatgggatttccagcagagaggctggagggcgtgtacaggaacaatatcgacgatgtggtgaggttcctggactccaagcacaagaaccactataagatctacaatctgtgcgccgagcggcactatgataccgccaagttcaactgtagagtggcccagtacccatttgaggaccacaatccaccccagctggagctgatcaagcccttttgcgaggacctggatcagtggctgagcgaggacgataatcacgtggcagcaatccactgcaaggcaggcaagggaaggacaggcgtgatgatctgtgcctatctgctgcacaggggcaagttcctgaaggcccaggaggccctggacttttacggcgaggtgcggaccagagataagaagggcgtgacaatccctagccagcggcggtacgtgtactattactcctacctgctgaagaaccacctggactaccgcccagtggccctgctgtttcacaagatgatgttcgagacaatccctatgttctccggcggcacatgcaacccacagtttgtggtgtgccagctgaaggtgaagatctatagctccaattctggccccaccaggcgcgaggataagttcatgtactttgagttcccccagcctctgccagtgtgcggcgacatcaaggtggagtttttccacaagcagaacaagatgctgaagaaggataagatgtttcacttctgggtgaatacctttttcatccccggccctgaggagacaagcgagaaggtggagaatggctccctgtgcgaccaggagatcgattctatctgtagcatcgagagggccgacaacgataaggagtacctggtgctgaccctgacaaagaatgacctggataaggccaacaaggacaaggccaatcgctatttttctcccaacttcaaggtgaagctgtacttcaccaagacagtggaggagcctagcaatccagaggcctctagctccaccagcgtgacacccgacgtgtccgataacgagcctgaccactatcggtactccgataccacagactctgatcctgagaacgagccatttgacgaagaccagcatactcagattactaaagtccaccatcatcaccaccactaataagcttggatcc

SEQ ID NO: 63 - DNA, 3198 bp, synthetic construct
  source 1..3198: mol_type = other DNA
gaattcccgccgccaccatgaaatgggtcacctttatcagcctgctgttcctgttcagcagcgcctacagcagaggcgtgttcagaagagatgcccacaagagcgaggtggcccacagattcaaggacctgggcgaagagaacttcaaggccctggtgctgatcgccttcgctcagtacctgcagcagtgcccctttgaggaccacgtgaagctggtcaacgaagtgaccgagttcgccaagacctgcgtggccgatgagagcgccgagaactgtgataagagcctgcacaccctgttcggcgacaagctgtgtacagtggccacactgagagaaacctacggcgagatggccgactgctgcgccaagcaagagcccgagagaaacgagtgcttcctgcagcacaaggacgacaaccccaacctgcctagactcgtgcggcctgaagtggacgtgatgtgcaccgccttccacgacaacgaggaaaccttcctgaagaagtacctgtacgagatcgccagacggcacccctacttttacgcccctgagctgctgttcttcgccaagcggtataaggccgccttcaccgagtgttgtcaggccgctgataaggctgcctgcctgctgcctaagctggacgagcttagagatgagggcaaagccagctccgccaagcagagactgaagtgtgccagcctgcagaagttcggcgagagagcctttaaggcctgggccgttgctagactgagccagagatttcccaaggccgagtttgccgaggtgtccaagctcgtgaccgacctgacaaaggtgcacaccgaatgctgccacggcgacctgctggaatgcgccgatgatagagccgacctggccaagtacatctgcgagaaccaggacagcatcagcagcaagctgaaagagtgctgcgagaagccactgctggaaaagagccactgtatcgccgaggtggaaaacgacgagatgcccgccgatctgccttctctggccgccgattttgtggaaagcaaggacgtgtgcaagaactacgccgaggccaaggatgtgttcctgggcatgtttctgtatgagtacgcccgcagacaccccgactactctgttgtgctgctgctgagactggccaaaacctacgagacaaccctggaaaagtgctgtgccgccgctgatcctcacgagtgttacgccaaggtgttcgacgagttcaagcctctggtggaagaaccccagaacctgatcaagcagaactgcgagctgttcgagcagctgggcgagtacaagttccagaacgccctgctcgtgcggtacaccaagaaggtgccccaggtttccacacctacactggttgaggtgtcccggaacctgggcaaagtgggcagcaagtgttgcaagcaccctgaggccaagagaatgccctgcgccgaggattacctgagcgtggtgctgaatcagctgtgcgtgctgcacgagaaaacccctgtgtccgacagagtgaccaagtgctgtaccgagagcctggtcaacagacggccttgctttagcgccctcgaggtggacgagacatacgtgcccaaagagttcaacgccgagacattcaccttccacgccgacatctgtaccctgagcgagaaagagcggcagatcaagaaacagactgccctggtggaactggtcaagcacaagcccaaggccaccaaagaacagctgaaggccgtgatggacgacttcgccgccttcgtggaaaaatgctgcaaggccgacgacaaagagacatgcttcgccgaagagggcaagaaactggtggccgcttctcaggctgctctcggactgctgcctcctaccagacggcggagaaggcggcatatacaaggaccaggacctgtgctgaacctgccatctgctgctgcagctcctcctgtggctagagcacctgaagctgctatgaccgccatcatcaaagaaatcgtgtctcggaacaagcggcgctaccaagaggacggcttcgacctggatctgacctacatctaccccaacatcattgccatgggcttccccgccgaaagactggaaggggtgtaccggaacaacatcgacgatgtcgtgcggttcctggactctaagcacaagaaccactacaagatctacaacctgtgcgccgagcggcactacgacaccgccaagttcaattgcagagtggcccagtatcctttcgaggatcacaaccctccacagctcgaactgattaagcccttctgcgaggacctggaccagtggctgagcgaggacgataatcacgtggccgccatccactgcaaagccggcaagggaagaaccggcgtgatgatctgtgcttacctgctgcaccggggcaagtttctgaaggcccaagaggctctggacttctacggcgaagtgcggaccagagacaagaaaggcgtgacaatccccagccagcggagatacgtgtactactacagctacctgctgaagaaccacctggactacagacccgtcgctctgctgtttcacaagatgatgttcgagactatccccatgttctccggcggcacctgtaatccccagttcgtcgtgtgtcagctcaaagtgaagatctactccagcaacagcggccccaccagacgcgaggataagttcatgtacttcgagttcccacagccactgcctgtgtgcggcgatatcaaggtggaatttttccataagcagaacaagatgctgaaaaaggacaagatgttccacttctgggtcaacaccttcttcatccccggacctgaagagacaagcgagaaggtcgagaacggctccctgtgcgaccaagagatcgacagcatctgctccatcgagcgggccgacaatgacaaagaatacctggtgctcaccctgaccaagaacgatctggacaaggccaacaaggataaggccaaccggtacttcagccccaacttcaaagtcaagctgtacttcaccaagaccgtcgaggaacccagcaatccagaggccagctctagcacctctgtgacccctgacgtgtccgataacgagcccgaccactacagatacagcgacaccaccgacagcgaccccgagaacgagccttttgatgaggaccagcacacccagatcaccaaggtgcaccaccaccatcaccactgataagcttggatcc

SEQ ID NO: 64 - DNA, 3210 bp, synthetic construct
  source 1..3210: mol_type = other DNA
gaattcccgccgccaccatgaaatgggtcacctttatcagcctgctgttcctgttcagcagcgcctacagcagaggcgtgttcagaagagatgcccacaagagcgaggtggcccacagattcaaggacctgggcgaagagaacttcaaggccctggtgctgatcgccttcgctcagtacctgcagcagtgcccctttgaggaccacgtgaagctggtcaacgaagtgaccgagttcgccaagacctgcgtggccgatgagagcgccgagaactgtgataagagcctgcacaccctgttcggcgacaagctgtgtacagtggccacactgagagaaacctacggcgagatggccgactgctgcgccaagcaagagcccgagagaaacgagtgcttcctgcagcacaaggacgacaaccccaacctgcctagactcgtgcggcctgaagtggacgtgatgtgcaccgccttccacgacaacgaggaaaccttcctgaagaagtacctgtacgagatcgccagacggcacccctacttttacgcccctgagctgctgttcttcgccaagcggtataaggccgccttcaccgagtgttgtcaggccgctgataaggctgcctgcctgctgcctaagctggacgagcttagagatgagggcaaagccagctccgccaagcagagactgaagtgtgccagcctgcagaagttcggcgagagagcctttaaggcctgggccgttgctagactgagccagagatttcccaaggccgagtttgccgaggtgtccaagctcgtgaccgacctgacaaaggtgcacaccgaatgctgccacggcgacctgctggaatgcgccgatgatagagccgacctggccaagtacatctgcgagaaccaggacagcatcagcagcaagctgaaagagtgctgcgagaagccactgctggaaaagagccactgtatcgccgaggtggaaaacgacgagatgcccgccgatctgccttctctggccgccgattttgtggaaagcaaggacgtgtgcaagaactacgccgaggccaaggatgtgttcctgggcatgtttctgtatgagtacgcccgcagacaccccgactactctgttgtgctgctgctgagactggccaaaacctacgagacaaccctggaaaagtgctgtgccgccgctgatcctcacgagtgttacgccaaggtgttcgacgagttcaagcctctggtggaagaaccccagaacctgatcaagcagaactgcgagctgttcgagcagctgggcgagtacaagttccagaacgccctgctcgtgcggtacaccaagaaggtgccccaggtttccacacctacactggttgaggtgtcccggaacctgggcaaagtgggcagcaagtgttgcaagcaccctgaggccaagagaatgccctgcgccgaggattacctgagcgtggtgctgaatcagctgtgcgtgctgcacgagaaaacccctgtgtccgacagagtgaccaagtgctgtaccgagagcctggtcaacagacggccttgctttagcgccctcgaggtggacgagacatacgtgcccaaagagttcaacgccgagacattcaccttccacgccgacatctgtaccctgagcgagaaagagcggcagatcaagaaacagactgccctggtggaactggtcaagcacaagcccaaggccaccaaagaacagctgaaggccgtgatggacgacttcgccgccttcgtggaaaaatgctgcaaggccgacgacaaagagacatgcttcgccgaagagggcaagaaactggtggccgcttctcaggctgctctcggacttggcggaggctctagaagcgaggactactctagcagccctcattctgctgccgctgccgctagacctctggctgccgaagaaaaacaggcccagagtctgcagcctagcagctccagaagaagcatgaccgccatcatcaaagaaatcgtgtctcggaacaagcggcgctaccaagaggacggcttcgacctggatctgacctacatctaccccaacatcattgccatgggcttccccgccgaaagactggaaggggtgtaccggaacaacatcgacgatgtcgtgcggttcctggactctaagcacaagaaccactacaagatctacaacctgtgcgccgagcggcactacgacaccgccaagttcaattgcagagtggcccagtatcctttcgaggatcacaaccctccacagctcgaactgattaagcccttctgcgaggacctggaccagtggctgagcgaggacgataatcacgtggccgccatccactgcaaagccggcaagggaagaaccggcgtgatgatctgtgcttacctgctgcaccggggcaagtttctgaaggcccaagaggctctggacttctacggcgaagtgcggaccagagacaagaaaggcgtgacaatccccagccagcggagatacgtgtactactacagctacctgctgaagaaccacctggactacagacccgtcgctctgctgtttcacaagatgatgttcgagactatccccatgttctccggcggcacctgtaatccccagttcgtcgtgtgtcagctcaaagtgaagatctactccagcaacagcggccccaccagacgcgaggataagttcatgtacttcgagttcccacagccactgcctgtgtgcggcgatatcaaggtggaatttttccataagcagaacaagatgctgaaaaaggacaagatgttccacttctgggtcaacaccttcttcatccccggacctgaagagacaagcgagaaggtcgagaacggctccctgtgcgaccaagagatcgacagcatctgctccatcgagcgggccgacaatgacaaagaatacctggtgctcaccctgaccaagaacgatctggacaaggccaacaaggataaggccaaccggtacttcagccccaacttcaaagtcaagctgtacttcaccaagaccgtcgaggaacccagcaatccagaggccagctctagcacctctgtgacccctgacgtgtccgataacgagcccgaccactacagatacagcgacaccaccgacagcgaccccgagaacgagccttttgatgaggaccagcacacccagatcaccaaggtgcaccaccaccatcaccactgataagcttggatcc

SEQ ID NO: 65 - DNA, 3246 bp, synthetic construct
  source 1..3246: mol_type = other DNA
gaattcccgccgccaccatgaaatgggtcacctttatcagcctgctgttcctgttcagcagcgcctacagcagaggcgtgttcagaagagatgcccacaagagcgaggtggcccacagattcaaggacctgggcgaagagaacttcaaggccctggtgctgatcgccttcgctcagtacctgcagcagtgcccctttgaggaccacgtgaagctggtcaacgaagtgaccgagttcgccaagacctgcgtggccgatgagagcgccgagaactgtgataagagcctgcacaccctgttcggcgacaagctgtgtacagtggccacactgagagaaacctacggcgagatggccgactgctgcgccaagcaagagcccgagagaaacgagtgcttcctgcagcacaaggacgacaaccccaacctgcctagactcgtgcggcctgaagtggacgtgatgtgcaccgccttccacgacaacgaggaaaccttcctgaagaagtacctgtacgagatcgccagacggcacccctacttttacgcccctgagctgctgttcttcgccaagcggtataaggccgccttcaccgagtgttgtcaggccgctgataaggctgcctgcctgctgcctaagctggacgagcttagagatgagggcaaagccagctccgccaagcagagactgaagtgtgccagcctgcagaagttcggcgagagagcctttaaggcctgggccgttgctagactgagccagagatttcccaaggccgagtttgccgaggtgtccaagctcgtgaccgacctgacaaaggtgcacaccgaatgctgccacggcgacctgctggaatgcgccgatgatagagccgacctggccaagtacatctgcgagaaccaggacagcatcagcagcaagctgaaagagtgctgcgagaagccactgctggaaaagagccactgtatcgccgaggtggaaaacgacgagatgcccgccgatctgccttctctggccgccgattttgtggaaagcaaggacgtgtgcaagaactacgccgaggccaaggatgtgttcctgggcatgtttctgtatgagtacgcccgcagacaccccgactactctgttgtgctgctgctgagactggccaaaacctacgagacaaccctggaaaagtgctgtgccgccgctgatcctcacgagtgttacgccaaggtgttcgacgagttcaagcctctggtggaagaaccccagaacctgatcaagcagaactgcgagctgttcgagcagctgggcgagtacaagttccagaacgccctgctcgtgcggtacaccaagaaggtgccccaggtttccacacctacactggttgaggtgtcccggaacctgggcaaagtgggcagcaagtgttgcaagcaccctgaggccaagagaatgccctgcgccgaggattacctgagcgtggtgctgaatcagctgtgcgtgctgcacgagaaaacccctgtgtccgacagagtgaccaagtgctgtaccgagagcctggtcaacagacggccttgctttagcgccctcgaggtggacgagacatacgtgcccaaagagttcaacgccgagacattcaccttccacgccgacatctgtaccctgagcgagaaagagcggcagatcaagaaacagactgccctggtggaactggtcaagcacaagcccaaggccaccaaagaacagctgaaggccgtgatggacgacttcgccgccttcgtggaaaaatgctgcaaggccgacgacaaagagacatgcttcgccgaagagggcaagaaactggtggccgcttctcaggctgctctcggacttagccattatcctgccgccgtgcagtcacaggctgcagctgaaaggggagcctctgccacagccaagagcagagccatcagcatcctgcagaaaaagccccggcaccagcaactgctgccaagcctgagcagcttcttcttctctcaccggctgcctgacatgaccgccatcatcaaagaaatcgtgtctcggaacaagcggcgctaccaagaggacggcttcgacctggatctgacctacatctaccccaacatcattgccatgggcttccccgccgaaagactggaaggggtgtaccggaacaacatcgacgatgtcgtgcggttcctggactctaagcacaagaaccactacaagatctacaacctgtgcgccgagcggcactacgacaccgccaagttcaattgcagagtggcccagtatcctttcgaggatcacaaccctccacagctcgaactgattaagcccttctgcgaggacctggaccagtggctgagcgaggacgataatcacgtggccgccatccactgcaaagccggcaagggaagaaccggcgtgatgatctgtgcttacctgctgcaccggggcaagtttctgaaggcccaagaggctctggacttctacggcgaagtgcggaccagagacaagaaaggcgtgacaatccccagccagcggagatacgtgtactactacagctacctgctgaagaaccacctggactacagacccgtcgctctgctgtttcacaagatgatgttcgagactatccccatgttctccggcggcacctgtaatccccagttcgtcgtgtgtcagctcaaagtgaagatctactccagcaacagcggccccaccagacgcgaggataagttcatgtacttcgagttcccacagccactgcctgtgtgcggcgatatcaaggtggaatttttccataagcagaacaagatgctgaaaaaggacaagatgttccacttctgggtcaacaccttcttcatccccggacctgaagagacaagcgagaaggtcgagaacggctccctgtgcgaccaagagatcgacagcatctgctccatcgagcgggccgacaatgacaaagaatacctggtgctcaccctgaccaagaacgatctggacaaggccaacaaggataaggccaaccggtacttcagccccaacttcaaagtcaagctgtacttcaccaagaccgtcgaggaacccagcaatccagaggccagctctagcacctctgtgacccctgacgtgtccgataacgagcccgaccactacagatacagcgacaccaccgacagcgaccccgagaacgagccttttgatgaggaccagcacacccagatcaccaaggtgcaccaccaccatcaccactgataagcttggatcc

SEQ ID NO: 66 - DNA, 3624 bp, synthetic construct
  source 1..3624: mol_type = other DNA
gaattcccgccgccaccatgaagtgggtgacctttattagcctgctgttcctgtttagttccgcatactcaagaggggtgtttagaagaagcgagagccctgtgaccatctccagggccggaaatgcaggagagctggtgtctcctctgctgctgccacctacacggagaaggcgccggagacacatccagggaccaggacctgtgctgaacctgccaagcgccgccgccgccccacccgtggccagagccccagaggcagcaggaggaggctccagatctgaggactatagctcctctccacacagcgccgccgccgccgcccggcccctggccgccgaggagaagcaggcccagtctctgcagcccagctcctctaggcgcagctcccactaccctgcagcagtgcagtcccaggctgccgccgagaggggagcctctgccaccgcaaagtctcgcgccatcagcatcctgcagaagaagccacgccaccagcagctgctgccctctctgtctagcttctttttcagccaccggctgcccgacatgaccgccatcatcaaggagatcgtgagcagaaataagcggcggtaccaggaggatggcttcgacctggatctgacatatatctaccccaacatcatcgccatgggatttcctgcagagcggctggagggcgtgtacagaaacaatatcgacgatgtggtgaggttcctggactccaagcacaagaaccactataagatctacaatctgtgcgccgagaggcactatgataccgccaagttcaactgtcgcgtggcccagtacccctttgaggaccacaatcctccacagctggagctgatcaagcctttctgcgaggacctggatcagtggctgtccgaggacgataatcacgtggcagcaatccactgcaaggcaggcaagggcaggacaggcgtgatgatctgtgcctatctgctgcaccgcggcaagttcctgaaggcccaggaggccctggacttttacggcgaggtgaggacccgcgataagaagggcgtgacaatcccaagccagcggcggtacgtgtactattactcctacctgctgaagaaccacctggactacaggccagtggccctgctgtttcacaagatgatgttcgagacaatccctatgttctccggcggcacatgcaacccacagtttgtggtgtgccagctgaaggtgaagatctattcctctaattctggcccaacccggagagaggataagttcatgtactttgagttcccacagccactgcccgtgtgcggcgacatcaaggtggagtttttccacaagcagaacaagatgctgaagaaggataagatgtttcacttctgggtgaatacctttttcatcccaggccccgaggagacatccgagaaggtggagaatggctctctgtgcgaccaggagatcgatagcatctgttccatcgagcgggccgacaacgataaggagtacctggtgctgaccctgacaaagaatgacctggataaggccaacaaggacaaggccaatagatacttcagccccaacttcaaggtgaagctgtacttcaccaagacagtggaggagccttccaatccagaggccagctcctctaccagcgtgacacctgacgtgtccgataacgagccagaccactatcggtactccgataccacagactctgatccagagaacgagccctttgacgaggatcagcacacccagatcacaaaggtgcatcaccaccaccaccacggacctgccgccctgaaggcagcaaccaataggcgcaagaagagggccctggacgcagcatatgatgcccacaagagcgaggtggcccaccgctttaaggacctgggcgaggagaacttcaaggccctggtgctgatcgcctttgcccagtacctgcagcagtgcccattcgaggatcacgtgaagctggtgaatgaggtgaccgagtttgccaagacatgcgtggccgacgagagcgccgagaactgtgataagtccctgcacaccctgttcggcgacaagctgtgcaccgtggccacactgcgggagacatatggcgagatggccgattgctgtgccaaacaggagcctgagagaaatgagtgctttctgcagcacaaggacgataacccaaatctgcctaggctggtgcggcccgaggtggacgtgatgtgcaccgcctttcacgataacgaggagacattcctgaagaagtatctgtacgagatcgcccggagacacccctatttctacgcccctgagctgctgtttttcgccaagagatacaaggccgcctttaccgagtgctgtcaggcagcagacaaggcagcatgcctgctgccaaagctggacgagctgagggatgagggcaaggccagctccgccaagcagagactgaagtgtgccagcctgcagaagtttggagagagggccttcaaggcctgggcagtggcaaggctgagccagcggttcccaaaggcagagttcgcagaggtgtccaagctggtgaccgatctgacaaaggtgcacaccgagtgctgtcacggcgacctgctggagtgcgcagacgatagggcagatctggccaagtacatctgtgagaaccaggactctatctctagcaagctgaaggagtgctgtgagaagcccctgctggagaagagccactgcatcgccgaggtggagaatgacgagatgcctgccgatctgccatctctggccgccgacttcgtggagagcaaggacgtgtgcaagaactatgccgaggccaaggacgtgtttctgggcatgttcctgtatgagtacgccaggcgccaccccgattattccgtggtgctgctgctgcggctggccaagacctacgagacaaccctggagaagtgctgtgccgccgccgacccccacgagtgctacgcaaaggtgtttgacgagttcaagccactggtggaggagccccagaacctgatcaagcagaattgtgagctgttcgagcagctgggcgagtataagtttcagaatgccctgctggtgagatacacaaagaaggtgcctcaggtgtccaccccaacactggtggaggtgtctaggaacctgggcaaggtcggcagcaagtgctgtaagcacccagaggcaaagaggatgccttgcgccgaggactatctgtctgtggtgctgaaccagctgtgcgtgctgcacgagaagacccccgtgagcgatcgggtgaccaagtgctgtacagagtctctggtgaatagacggccctgcttcagcgccctggaggtggacgagacatacgtgccaaaggagtttaacgccgagacattcaccttccacgccgacatctgtaccctgtccgagaaggagagacagatcaagaagcagacagccctggtggagctggtgaagcacaagcctaaggccaccaaggagcagctgaaggccgtgatggacgattttgccgccttcgtggagaagtgctgtaaggccgacgataaggagacatgcttcgccgaggagggcaagaagctggtcgccgcttcacaggctgctctggggctggactacaaggacgatgatgacaaatgataagctt

SEQ ID NO: 67 - DNA, 3582 bp, synthetic construct
  source 1..3582: mol_type = other DNA
gaattcccgccgccaccatgaagtgggtgacctttattagcctgctgttcctgtttagttccgcatactcaagaggggtgtttagaagaagcgagagccctgtgaccatctccagggccggaaatgcaggagagctggtgtctcctctgctgctgccacctacacggagaaggcgccggagacacatccagggaccaggacctgtgctgaacctgccaagcgccgccgccgccccacccgtggccagagccccagaggcagcaggaggaggctccagatctgaggactatagctcctctccacacagcgccgccgccgccgcccggcccctggccgccgaggagaagcaggcccagtctctgcagcccagctcctctaggcgcagctcccactaccctgcagcagtgcagtcccaggctgccgccgagaggggagcctctgccaccgcaaagtctcgcgccatcagcatcctgcagaagaagccacgccaccagcagctgctgccctctctgtctagcttctttttcagccaccggctgcccgacatgaccgccatcatcaaggagatcgtgagcagaaataagcggcggtaccaggaggatggcttcgacctggatctgacatatatctaccccaacatcatcgccatgggatttcctgcagagcggctggagggcgtgtacagaaacaatatcgacgatgtggtgaggttcctggactccaagcacaagaaccactataagatctacaatctgtgcgccgagaggcactatgataccgccaagttcaactgtcgcgtggcccagtacccctttgaggaccacaatcctccacagctggagctgatcaagcctttctgcgaggacctggatcagtggctgtccgaggacgataatcacgtggcagcaatccactgcaaggcaggcaagggcaggacaggcgtgatgatctgtgcctatctgctgcaccgcggcaagttcctgaaggcccaggaggccctggacttttacggcgaggtgaggacccgcgataagaagggcgtgacaatcccaagccagcggcggtacgtgtactattactcctacctgctgaagaaccacctggactacaggccagtggccctgctgtttcacaagatgatgttcgagacaatccctatgttctccggcggcacatgcaacccacagtttgtggtgtgccagctgaaggtgaagatctattcctctaattctggcccaacccggagagaggataagttcatgtactttgagttcccacagccactgcccgtgtgcggcgacatcaaggtggagtttttccacaagcagaacaagatgctgaagaaggataagatgtttcacttctgggtgaatacctttttcatcccaggccccgaggagacatccgagaaggtggagaatggctctctgtgcgaccaggagatcgatagcatctgttccatcgagcgggccgacaacgataaggagtacctggtgctgaccctgacaaagaatgacctggataaggccaacaaggacaaggccaatagatacttcagccccaacttcaaggtgaagctgtacttcaccaagacagtggaggagccttccaatccagaggccagctcctctaccagcgtgacacctgacgtgtccgataacgagccagaccactatcggtactccgataccacagactctgatccagagaacgagccctttgacgaggatcagcacacccagatcacaaaggtgaccaataggcgcaagaagagggccctggacgcagcatatgatgcccacaagagcgaggtggcccaccgctttaaggacctgggcgaggagaacttcaaggccctggtgctgatcgcctttgcccagtacctgcagcagtgcccattcgaggatcacgtgaagctggtgaatgaggtgaccgagtttgccaagacatgcgtggccgacgagagcgccgagaactgtgataagtccctgcacaccctgttcggcgacaagctgtgcaccgtggccacactgcgggagacatatggcgagatggccgattgctgtgccaaacaggagcctgagagaaatgagtgctttctgcagcacaaggacgataacccaaatctgcctaggctggtgcggcccgaggtggacgtgatgtgcaccgcctttcacgataacgaggagacattcctgaagaagtatctgtacgagatcgcccggagacacccctatttctacgcccctgagctgctgtttttcgccaagagatacaaggccgcctttaccgagtgctgtcaggcagcagacaaggcagcatgcctgctgccaaagctggacgagctgagggatgagggcaaggccagctccgccaagcagagactgaagtgtgccagcctgcagaagtttggagagagggccttcaaggcctgggcagtggcaaggctgagccagcggttcccaaaggcagagttcgcagaggtgtccaagctggtgaccgatctgacaaaggtgcacaccgagtgctgtcacggcgacctgctggagtgcgcagacgatagggcagatctggccaagtacatctgtgagaaccaggactctatctctagcaagctgaaggagtgctgtgagaagcccctgctggagaagagccactgcatcgccgaggtggagaatgacgagatgcctgccgatctgccatctctggccgccgacttcgtggagagcaaggacgtgtgcaagaactatgccgaggccaaggacgtgtttctgggcatgttcctgtatgagtacgccaggcgccaccccgattattccgtggtgctgctgctgcggctggccaagacctacgagacaaccctggagaagtgctgtgccgccgccgacccccacgagtgctacgcaaaggtgtttgacgagttcaagccactggtggaggagccccagaacctgatcaagcagaattgtgagctgttcgagcagctgggcgagtataagtttcagaatgccctgctggtgagatacacaaagaaggtgcctcaggtgtccaccccaacactggtggaggtgtctaggaacctgggcaaggtcggcagcaagtgctgtaagcacccagaggcaaagaggatgccttgcgccgaggactatctgtctgtggtgctgaaccagctgtgcgtgctgcacgagaagacccccgtgagcgatcgggtgaccaagtgctgtacagagtctctggtgaatagacggccctgcttcagcgccctggaggtggacgagacatacgtgccaaaggagtttaacgccgagacattcaccttccacgccgacatctgtaccctgtccgagaaggagagacagatcaagaagcagacagccctggtggagctggtgaagcacaagcctaaggccaccaaggagcagctgaaggccgtgatggacgattttgccgccttcgtggagaagtgctgtaaggccgacgataaggagacatgcttcgccgaggagggcaagaagctggtcgccgcttcacaggctgctctggggctgcatcaccaccaccaccactgataagcttggatcc

SEQ ID NO: 68 - DNA, 3543 bp, synthetic construct
  source 1..3543: mol_type = other DNA
gaattcccgccgccaccatgaagtgggtgacctttattagcctgctgttcctgtttagttccgcatactcaagaggggtgtttagaagaagcgagagccctgtgaccatctccagggccggaaatgcaggagagctggtgtctcctctgctgctgccacctacacggagaaggcgccggagacacatccagggaccaggacctgtgctgaacctgccaagcgccgccgccgccccacccgtggccagagccccagaggcagcaggaggaggctccagatctgaggactatagctcctctccacacagcgccgccgccgccgcccggcccctggccgccgaggagaagcaggcccagtctctgcagcccagctcctctaggcgcagctcccactaccctgcagcagtgcagtcccaggctgccgccgagaggggagcctctgccaccgcaaagtctcgcgccatcagcatcctgcagaagaagccacgccaccagcagctgctgccctctctgtctagcttctttttcagccaccggctgcccgacatgaccgccatcatcaaggagatcgtgagcagaaataagcggcggtaccaggaggatggcttcgacctggatctgacatatatctaccccaacatcatcgccatgggatttcctgcagagcggctggagggcgtgtacagaaacaatatcgacgatgtggtgaggttcctggactccaagcacaagaaccactataagatctacaatctgtgcgccgagaggcactatgataccgccaagttcaactgtcgcgtggcccagtacccctttgaggaccacaatcctccacagctggagctgatcaagcctttctgcgaggacctggatcagtggctgtccgaggacgataatcacgtggcagcaatccactgcaaggcaggcaagggcaggacaggcgtgatgatctgtgcctatctgctgcaccgcggcaagttcctgaaggcccaggaggccctggacttttacggcgaggtgaggacccgcgataagaagggcgtgacaatcccaagccagcggcggtacgtgtactattactcctacctgctgaagaaccacctggactacaggccagtggccctgctgtttcacaagatgatgttcgagacaatccctatgttctccggcggcacatgcaacccacagtttgtggtgtgccagctgaaggtgaagatctattcctctaattctggcccaacccggagagaggataagttcatgtactttgagttcccacagccactgcccgtgtgcggcgacatcaaggtggagtttttccacaagcagaacaagatgctgaagaaggataagatgtttcacttctgggtgaatacctttttcatcccaggccccgaggagacatccgagaaggtggagaatggctctctgtgcgaccaggagatcgatagcatctgttccatcgagcgggccgacaacgataaggagtacctggtgctgaccctgacaaagaatgacctggataaggccaacaaggacaaggccaatagatacttcagccccaacttcaaggtgaagctgtacttcaccaagacagtggaggagccttccaatccagaggccagctcctctaccagcgtgacacctgacgtgtccgataacgagccagaccactatcggtactccgataccacagactctgatccagagaacgagccctttgacgaggatcagcacacccagatcacaaaggtggatgcccacaagagcgaggtggcccaccgctttaaggacctgggcgaggagaacttcaaggccctggtgctgatcgcctttgcccagtacctgcagcagtgcccattcgaggatcacgtgaagctggtgaatgaggtgaccgagtttgccaagacatgcgtggccgacgagagcgccgagaactgtgataagtccctgcacaccctgttcggcgacaagctgtgcaccgtggccacactgcgggagacatatggcgagatggccgattgctgtgccaaacaggagcctgagagaaatgagtgctttctgcagcacaaggacgataacccaaatctgcctaggctggtgcggcccgaggtggacgtgatgtgcaccgcctttcacgataacgaggagacattcctgaagaagtatctgtacgagatcgcccggagacacccctatttctacgcccctgagctgctgtttttcgccaagagatacaaggccgcctttaccgagtgctgtcaggcagcagacaaggcagcatgcctgctgccaaagctggacgagctgagggatgagggcaaggccagctccgccaagcagagactgaagtgtgccagcctgcagaagtttggagagagggccttcaaggcctgggcagtggcaaggctgagccagcggttcccaaaggcagagttcgcagaggtgtccaagctggtgaccgatctgacaaaggtgcacaccgagtgctgtcacggcgacctgctggagtgcgcagacgatagggcagatctggccaagtacatctgtgagaaccaggactctatctctagcaagctgaaggagtgctgtgagaagcccctgctggagaagagccactgcatcgccgaggtggagaatgacgagatgcctgccgatctgccatctctggccgccgacttcgtggagagcaaggacgtgtgcaagaactatgccgaggccaaggacgtgtttctgggcatgttcctgtatgagtacgccaggcgccaccccgattattccgtggtgctgctgctgcggctggccaagacctacgagacaaccctggagaagtgctgtgccgccgccgacccccacgagtgctacgcaaaggtgtttgacgagttcaagccactggtggaggagccccagaacctgatcaagcagaattgtgagctgttcgagcagctgggcgagtataagtttcagaatgccctgctggtgagatacacaaagaaggtgcctcaggtgtccaccccaacactggtggaggtgtctaggaacctgggcaaggtcggcagcaagtgctgtaagcacccagaggcaaagaggatgccttgcgccgaggactatctgtctgtggtgctgaaccagctgtgcgtgctgcacgagaagacccccgtgagcgatcgggtgaccaagtgctgtacagagtctctggtgaatagacggccctgcttcagcgccctggaggtggacgagacatacgtgccaaaggagtttaacgccgagacattcaccttccacgccgacatctgtaccctgtccgagaaggagagacagatcaagaagcagacagccctggtggagctggtgaagcacaagcctaaggccaccaaggagcagctgaaggccgtgatggacgattttgccgccttcgtggagaagtgctgtaaggccgacgataaggagacatgcttcgccgaggagggcaagaagctggtcgccgcttcacaggctgctctggggctgcatcaccaccaccaccactgataagcttggatcc

SEQ ID NO: 69 - DNA, 3222 bp, synthetic construct
  source 1..3222: mol_type = other DNA
gaattcccgccgccaccatgaagtgggtgacctttattagcctgctgttcctgtttagttccgcatactcaagaggggtgtttagaagaagcgagagccctgtgaccccacctacacggagaaggcgccggagacacatccagggaccaggacctaagaagccacgccaccagcagctgctgccctctctgtctagcttctttttcagccaccggctgcccgacatgaccgccatcatcaaggagatcgtgagcagaaataagcggcggtaccaggaggatggcttcgacctggatctgacatatatctaccccaacatcatcgccatgggatttcctgcagagcggctggagggcgtgtacagaaacaatatcgacgatgtggtgaggttcctggactccaagcacaagaaccactataagatctacaatctgtgcgccgagaggcactatgataccgccaagttcaactgtcgcgtggcccagtacccctttgaggaccacaatcctccacagctggagctgatcaagcctttctgcgaggacctggatcagtggctgtccgaggacgataatcacgtggcagcaatccactgcaaggcaggcaagggcaggacaggcgtgatgatctgtgcctatctgctgcaccgcggcaagttcctgaaggcccaggaggccctggacttttacggcgaggtgaggacccgcgataagaagggcgtgacaatcccaagccagcggcggtacgtgtactattactcctacctgctgaagaaccacctggactacaggccagtggccctgctgtttcacaagatgatgttcgagacaatccctatgttctccggcggcacatgcaacccacagtttgtggtgtgccagctgaaggtgaagatctattcctctaattctggcccaacccggagagaggataagttcatgtactttgagttcccacagccactgcccgtgtgcggcgacatcaaggtggagtttttccacaagcagaacaagatgctgaagaaggataagatgtttcacttctgggtgaatacctttttcatcccaggccccgaggagacatccgagaaggtggagaatggctctctgtgcgaccaggagatcgatagcatctgttccatcgagcgggccgacaacgataaggagtacctggtgctgaccctgacaaagaatgacctggataaggccaacaaggacaaggccaatagatacttcagccccaacttcaaggtgaagctgtacttcaccaagacagtggaggagccttccaatccagaggccagctcctctaccagcgtgacacctgacgtgtccgataacgagccagaccactatcggtactccgataccacagactctgatccagagaacgagccctttgacgaggatcagcacacccagatcacaaaggtggatgcccacaagagcgaggtggcccaccgctttaaggacctgggcgaggagaacttcaaggccctggtgctgatcgcctttgcccagtacctgcagcagtgcccattcgaggatcacgtgaagctggtgaatgaggtgaccgagtttgccaagacatgcgtggccgacgagagcgccgagaactgtgataagtccctgcacaccctgttcggcgacaagctgtgcaccgtggccacactgcgggagacatatggcgagatggccgattgctgtgccaaacaggagcctgagagaaatgagtgctttctgcagcacaaggacgataacccaaatctgcctaggctggtgcggcccgaggtggacgtgatgtgcaccgcctttcacgataacgaggagacattcctgaagaagtatctgtacgagatcgcccggagacacccctatttctacgcccctgagctgctgtttttcgccaagagatacaaggccgcctttaccgagtgctgtcaggcagcagacaaggcagcatgcctgctgccaaagctggacgagctgagggatgagggcaaggccagctccgccaagcagagactgaagtgtgccagcctgcagaagtttggagagagggccttcaaggcctgggcagtggcaaggctgagccagcggttcccaaaggcagagttcgcagaggtgtccaagctggtgaccgatctgacaaaggtgcacaccgagtgctgtcacggcgacctgctggagtgcgcagacgatagggcagatctggccaagtacatctgtgagaaccaggactctatctctagcaagctgaaggagtgctgtgagaagcccctgctggagaagagccactgcatcgccgaggtggagaatgacgagatgcctgccgatctgccatctctggccgccgacttcgtggagagcaaggacgtgtgcaagaactatgccgaggccaaggacgtgtttctgggcatgttcctgtatgagtacgccaggcgccaccccgattattccgtggtgctgctgctgcggctggccaagacctacgagacaaccctggagaagtgctgtgccgccgccgacccccacgagtgctacgcaaaggtgtttgacgagttcaagccactggtggaggagccccagaacctgatcaagcagaattgtgagctgttcgagcagctgggcgagtataagtttcagaatgccctgctggtgagatacacaaagaaggtgcctcaggtgtccaccccaacactggtggaggtgtctaggaacctgggcaaggtcggcagcaagtgctgtaagcacccagaggcaaagaggatgccttgcgccgaggactatctgtctgtggtgctgaaccagctgtgcgtgctgcacgagaagacccccgtgagcgatcgggtgaccaagtgctgtacagagtctctggtgaatagacggccctgcttcagcgccctggaggtggacgagacatacgtgccaaaggagtttaacgccgagacattcaccttccacgccgacatctgtaccctgtccgagaaggagagacagatcaagaagcagacagccctggtggagctggtgaagcacaagcctaaggccaccaaggagcagctgaaggccgtgatggacgattttgccgccttcgtggagaagtgctgtaaggccgacgataaggagacatgcttcgccgaggagggcaagaagctggtcgccgcttcacaggctgctctggggctgcatcaccaccaccaccactgataagcttggatcc

SEQ ID NO: 70 - DNA, 3261 bp, synthetic construct
  source 1..3261: mol_type = other DNA
gaattcccgccgccaccatgaagtgggtgacctttattagcctgctgttcctgtttagttccgcatactcaagaggggtgtttagaagaagcgagagccctgtgaccccacctacacggagaaggcgccggagacacatccagggaccaggacctaagaagccacgccaccagcagctgctgccctctctgtctagcttctttttcagccaccggctgcccgacatgaccgccatcatcaaggagatcgtgagcagaaataagcggcggtaccaggaggatggcttcgacctggatctgacatatatctaccccaacatcatcgccatgggatttcctgcagagcggctggagggcgtgtacagaaacaatatcgacgatgtggtgaggttcctggactccaagcacaagaaccactataagatctacaatctgtgcgccgagaggcactatgataccgccaagttcaactgtcgcgtggcccagtacccctttgaggaccacaatcctccacagctggagctgatcaagcctttctgcgaggacctggatcagtggctgtccgaggacgataatcacgtggcagcaatccactgcaaggcaggcaagggcaggacaggcgtgatgatctgtgcctatctgctgcaccgcggcaagttcctgaaggcccaggaggccctggacttttacggcgaggtgaggacccgcgataagaagggcgtgacaatcccaagccagcggcggtacgtgtactattactcctacctgctgaagaaccacctggactacaggccagtggccctgctgtttcacaagatgatgttcgagacaatccctatgttctccggcggcacatgcaacccacagtttgtggtgtgccagctgaaggtgaagatctattcctctaattctggcccaacccggagagaggataagttcatgtactttgagttcccacagccactgcccgtgtgcggcgacatcaaggtggagtttttccacaagcagaacaagatgctgaagaaggataagatgtttcacttctgggtgaatacctttttcatcccaggccccgaggagacatccgagaaggtggagaatggctctctgtgcgaccaggagatcgatagcatctgttccatcgagcgggccgacaacgataaggagtacctggtgctgaccctgacaaagaatgacctggataaggccaacaaggacaaggccaatagatacttcagccccaacttcaaggtgaagctgtacttcaccaagacagtggaggagccttccaatccagaggccagctcctctaccagcgtgacacctgacgtgtccgataacgagccagaccactatcggtactccgataccacagactctgatccagagaacgagccctttgacgaggatcagcacacccagatcacaaaggtgaccaataggcgcaagaagagggccctggacgcagcatatgatgcccacaagagcgaggtggcccaccgctttaaggacctgggcgaggagaacttcaaggccctggtgctgatcgcctttgcccagtacctgcagcagtgcccattcgaggatcacgtgaagctggtgaatgaggtgaccgagtttgccaagacatgcgtggccgacgagagcgccgagaactgtgataagtccctgcacaccctgttcggcgacaagctgtgcaccgtggccacactgcgggagacatatggcgagatggccgattgctgtgccaaacaggagcctgagagaaatgagtgctttctgcagcacaaggacgataacccaaatctgcctaggctggtgcggcccgaggtggacgtgatgtgcaccgcctttcacgataacgaggagacattcctgaagaagtatctgtacgagatcgcccggagacacccctatttctacgcccctgagctgctgtttttcgccaagagatacaaggccgcctttaccgagtgctgtcaggcagcagacaaggcagcatgcctgctgccaaagctggacgagctgagggatgagggcaaggccagctccgccaagcagagactgaagtgtgccagcctgcagaagtttggagagagggccttcaaggcctgggcagtggcaaggctgagccagcggttcccaaaggcagagttcgcagaggtgtccaagctggtgaccgatctgacaaaggtgcacaccgagtgctgtcacggcgacctgctggagtgcgcagacgatagggcagatctggccaagtacatctgtgagaaccaggactctatctctagcaagctgaaggagtgctgtgagaagcccctgctggagaagagccactgcatcgccgaggtggagaatgacgagatgcctgccgatctgccatctctggccgccgacttcgtggagagcaaggacgtgtgcaagaactatgccgaggccaaggacgtgtttctgggcatgttcctgtatgagtacgccaggcgccaccccgattattccgtggtgctgctgctgcggctggccaagacctacgagacaaccctggagaagtgctgtgccgccgccgacccccacgagtgctacgcaaaggtgtttgacgagttcaagccactggtggaggagccccagaacctgatcaagcagaattgtgagctgttcgagcagctgggcgagtataagtttcagaatgccctgctggtgagatacacaaagaaggtgcctcaggtgtccaccccaacactggtggaggtgtctaggaacctgggcaaggtcggcagcaagtgctgtaagcacccagaggcaaagaggatgccttgcgccgaggactatctgtctgtggtgctgaaccagctgtgcgtgctgcacgagaagacccccgtgagcgatcgggtgaccaagtgctgtacagagtctctggtgaatagacggccctgcttcagcgccctggaggtggacgagacatacgtgccaaaggagtttaacgccgagacattcaccttccacgccgacatctgtaccctgtccgagaaggagagacagatcaagaagcagacagccctggtggagctggtgaagcacaagcctaaggccaccaaggagcagctgaaggccgtgatggacgattttgccgccttcgtggagaagtgctgtaaggccgacgataaggagacatgcttcgccgaggagggcaagaagctggtcgccgcttcacaggctgctctggggctgcatcaccaccaccaccactgataagcttggatcc

SEQ ID NO: 71 - DNA, 1788 bp, synthetic construct
  source 1..1788: mol_type = other DNA
gaattcccgccgccaccatgaagtgggtgacctttattagcctgctgttcctgtttagttccgcatactcaagaggggtgtttagaagaagcgagagccctgtgaccatctccagggccggaaatgcaggagagctggtgtctcctctgctgctgccacctacacggagaaggcgccggagacacatccagggaccaggacctgtgctgaacctgccaagcgccgccgccgccccacccgtggccagagccccagaggcagcaggaggaggctccagatctgaggactatagctcctctccacacagcgccgccgccgccgcccggcccctggccgccgaggagaagcaggcccagtctctgcagcccagctcctctaggcgcagctcccactaccctgcagcagtgcagtcccaggctgccgccgagaggggagcctctgccaccgcaaagtctcgcgccatcagcatcctgcagaagaagccacgccaccagcagctgctgccctctctgtctagcttctttttcagccaccggctgcccgacatgaccgccatcatcaaggagatcgtgagcagaaataagcggcggtaccaggaggatggcttcgacctggatctgacatatatctaccccaacatcatcgccatgggatttcctgcagagcggctggagggcgtgtacagaaacaatatcgacgatgtggtgaggttcctggactccaagcacaagaaccactataagatctacaatctgtgcgccgagaggcactatgataccgccaagttcaactgtcgcgtggcccagtacccctttgaggaccacaatcctccacagctggagctgatcaagcctttctgcgaggacctggatcagtggctgtccgaggacgataatcacgtggcagcaatccactgcaaggcaggcaagggcaggacaggcgtgatgatctgtgcctatctgctgcaccgcggcaagttcctgaaggcccaggaggccctggacttttacggcgaggtgaggacccgcgataagaagggcgtgacaatcccaagccagcggcggtacgtgtactattactcctacctgctgaagaaccacctggactacaggccagtggccctgctgtttcacaagatgatgttcgagacaatccctatgttctccggcggcacatgcaacccacagtttgtggtgtgccagctgaaggtgaagatctattcctctaattctggcccaacccggagagaggataagttcatgtactttgagttcccacagccactgcccgtgtgcggcgacatcaaggtggagtttttccacaagcagaacaagatgctgaagaaggataagatgtttcacttctgggtgaatacctttttcatcccaggccccgaggagacatccgagaaggtggagaatggctctctgtgcgaccaggagatcgatagcatctgttccatcgagcgggccgacaacgataaggagtacctggtgctgaccctgacaaagaatgacctggataaggccaacaaggacaaggccaatagatacttcagccccaacttcaaggtgaagctgtacttcaccaagacagtggaggagccttccaatccagaggccagctcctctaccagcgtgacacctgacgtgtccgataacgagccagaccactatcggtactccgataccacagactctgatccagagaacgagccctttgacgaggatcagcacacccagatcacaaaggtgcatcaccaccaccaccactgataagcttggatcc

SEQ ID NO: 72 - DNA, 1773 bp, synthetic construct
  source 1..1773: mol_type = other DNA
gaattcccgccgccaccatggagtttgggctgtcatgggtgttcctggtcgcaatcctgaaaggcgtgcagtgttccgagagccctgtgaccatctccagggccggaaatgcaggagagctggtgtctcctctgctgctgccacctacacggagaaggcgccggagacacatccagggaccaggacctgtgctgaacctgccaagcgccgccgccgccccacccgtggccagagccccagaggcagcaggaggaggctccagatctgaggactatagctcctctccacacagcgccgccgccgccgcccggcccctggccgccgaggagaagcaggcccagtctctgcagcccagctcctctaggcgcagctcccactaccctgcagcagtgcagtcccaggctgccgccgagaggggagcctctgccaccgcaaagtctcgcgccatcagcatcctgcagaagaagccacgccaccagcagctgctgccctctctgtctagcttctttttcagccaccggctgcccgacatgaccgccatcatcaaggagatcgtgagcagaaataagcggcggtaccaggaggatggcttcgacctggatctgacatatatctaccccaacatcatcgccatgggatttcctgcagagcggctggagggcgtgtacagaaacaatatcgacgatgtggtgaggttcctggactccaagcacaagaaccactataagatctacaatctgtgcgccgagaggcactatgataccgccaagttcaactgtcgcgtggcccagtacccctttgaggaccacaatcctccacagctggagctgatcaagcctttctgcgaggacctggatcagtggctgtccgaggacgataatcacgtggcagcaatccactgcaaggcaggcaagggcaggacaggcgtgatgatctgtgcctatctgctgcaccgcggcaagttcctgaaggcccaggaggccctggacttttacggcgaggtgaggacccgcgataagaagggcgtgacaatcccaagccagcggcggtacgtgtactattactcctacctgctgaagaaccacctggactacaggccagtggccctgctgtttcacaagatgatgttcgagacaatccctatgttctccggcggcacatgcaacccacagtttgtggtgtgccagctgaaggtgaagatctattcctctaattctggcccaacccggagagaggataagttcatgtactttgagttcccacagccactgcccgtgtgcggcgacatcaaggtggagtttttccacaagcagaacaagatgctgaagaaggataagatgtttcacttctgggtgaatacctttttcatcccaggccccgaggagacatccgagaaggtggagaatggctctctgtgcgaccaggagatcgatagcatctgttccatcgagcgggccgacaacgataaggagtacctggtgctgaccctgacaaagaatgacctggataaggccaacaaggacaaggccaatagatacttcagccccaacttcaaggtgaagctgtacttcaccaagacagtggaggagccttccaatccagaggccagctcctctaccagcgtgacacctgacgtgtccgataacgagccagaccactatcggtactccgataccacagactctgatccagagaacgagccctttgacgaggatcagcacacccagatcacaaaggtgcatcaccaccaccaccactgataagcttggatcc

SEQ ID NO: 73 - DNA, 1788 bp, synthetic construct
  source 1..1788: mol_type = other DNA
gaattcccgccgccaccatgaagtgggtgacctttattagcctgctgttcctgtttagttccgcatactcaagaggggtgtttagaagaagcgagagccctgtgaccccatccagggccggaaatgcaggagagctggtgtctcctctgctgccaccacctacacggagaaggcgccggagacacatccagggaccaggacctgtgctgaacctgccaagcgccgccgccgccccacccgtggccagagccccagaggcagcaggaggaggctccagatctgaggactatagctcctctccacacagcgccgccgccgccgcccggcccccagccgccgaggagaagcaggcccagtctctgcagcccagctcctctaggcgcagctcccactaccctgcagcagtgcagtcccaggctgccgccgagaggggagcctctgccaccgcaaagtctcgcgccatcagcatcctgcagaagaagccacgccaccagcagctgctgccctctctgtctagcttctttttcagccaccggctgcccgacatgaccgccatcatcaaggagatcgtgagcagaaataagcggcggtaccaggaggatggcttcgacctggatctgacatatatctaccccaacatcatcgccatgggatttcctgcagagcggctggagggcgtgtacagaaacaatatcgacgatgtggtgaggttcctggactccaagcacaagaaccactataagatctacaatctgtgcgccgagaggcactatgataccgccaagttcaactgtcgcgtggcccagtacccctttgaggaccacaatcctccacagctggagctgatcaagcctttctgcgaggacctggatcagtggctgtccgaggacgataatcacgtggcagcaatccactgcaaggcaggcaagggcaggacaggcgtgatgatctgtgcctatctgctgcaccgcggcaagttcctgaaggcccaggaggccctggacttttacggcgaggtgaggacccgcgataagaagggcgtgacaatcccaagccagcggcggtacgtgtactattactcctacctgctgaagaaccacctggactacaggccagtggccctgctgtttcacaagatgatgttcgagacaatccctatgttctccggcggcacatgcaacccacagtttgtggtgtgccagctgaaggtgaagatctattcctctaattctggcccaacccggagagaggataagttcatgtactttgagttcccacagccactgcccgtgtgcggcgacatcaaggtggagtttttccacaagcagaacaagatgctgaagaaggataagatgtttcacttctgggtgaatacctttttcatcccaggccccgaggagacatccgagaaggtggagaatggctctctgtgcgaccaggagatcgatagcatctgttccatcgagcgggccgacaacgataaggagtacctggtgctgaccctgacaaagaatgacctggataaggccaacaaggacaaggccaatagatacttcagccccaacttcaaggtgaagctgtacttcaccaagacagtggaggagccttccaatccagaggccagctcctctaccagcgtgacacctgacgtgtccgataacgagccagaccactatcggtactccgataccacagactctgatccagagaacgagccctttgacgaggatcagcacacccagatcacaaaggtgcatcaccaccaccaccactgataagcttggatcc

SEQ ID NO: 74 - DNA, 2423 bp, synthetic construct
  source 1..2423: mol_type = other DNA
gaattcccgccgccaccatggagtttgggctgtcctgggtctttctggtcgcaatcctgaagggcgtgcagtgttccgaatcccccgtcacaatctcaagggcaggaaatgcaggagagctggtgtccccactgctgctgccacctacccggagaaggcgccggagacacatccagggaccaggacctgtgctgaacctgccaagcgccgccgccgccccacccgtggcaagggcaccagaggcagcaggaggaggcagccgctccgaggactatagctcctctccccactccgccgcagcagcagcaaggcctctggcagccgaggagaagcaggcccagtctctgcagcccagctcctctaggcgcagctcccactaccctgcagcagtgcagagccaggcagcagcagagaggggagcatccgccaccgccaagtctcgcgccatcagcatcctgcagaagaagccaaggcaccagcagctgctgccttccctgtctagcttctttttctctcacaggctgcccgatatgaccgccatcatcaaggagatcgtgtcccgcaataagcggagatatcaggaggacggctttgacctggatctgacatatatctaccctaacatcatcgccatgggattcccagcagagcggctggagggcgtgtacagaaacaatatcgacgatgtggtgaggtttctggatagcaagcacaagaaccactataagatctacaatctgtgcgccgagcggcactatgacaccgccaagtttaactgtagagtggcccagtaccccttcgaggatcacaatcctccacagctggagctgatcaagcctttctgcgaggacctggatcagtggctgtccgaggacgataatcacgtggcagcaatccactgcaaggcaggcaagggaaggacaggcgtgatgatctgtgcctatctgctgcacaggggcaagtttctgaaggcccaggaggccctggacttctacggcgaggtgaggacccgcgataagaagggcgtgacaatcccttctcagcggcggtacgtgtactattacagctacctgctgaagaaccacctggactaccgcccagtggccctgctgtttcacaagatgatgttcgagaccatcccaatgttttctggcggcacatgcaacccccagttcgtggtgtgccagctgaaggtgaagatctattcctctaatagcggccccacccggagagaggacaagttcatgtactttgagttcccacagccactgcccgtgtgcggcgatatcaaggtggagtttttccacaagcagaacaagatgctgaagaaggacaagatgtttcacttctgggtgaatacctttttcatcccaggccccgaggagacaagcgagaaggtggagaatggctccctgtgcgaccaggagatcgattccatctgttctatcgagcgggccgacaacgataaggagtacctggtgctgaccctgacaaagaatgacctggataaggccaacaaggacaaggccaatagatacttcagccctaacttcaaggtgaagctgtactttaccaagacagtggaggagccctccaatcctgaggccagctcctctaccagcgtgacaccagacgtgtccgataacgagcccgaccactatcggtactccgataccacagactctgatcctgagaatgagccattcgacgaggatcagcacacccagatcacaaaggtgcaccaccaccaccaccacccttgcccagcaccagagctgctgggaggccctagcgtgtttctgttcccccctaagccaaaggataccctgatgatcagcagaaccccagaggtgacatgcgtggtggtggacgtgtcccacgaggaccccgaggtgaagttcaactggtacgtggacggcgtggaggtgcacaatgccaagacaaagccccgggaggagcagtataactctacctacagagtggtgagcgtgctgacagtgctgcaccaggattggctgaacggcaaggagtacaagtgcaaggtgtctaataaggccctgcctgccccaatcgagaagaccatcagcaaggcaaagggacagccaagggagccacaggtgtatacactgccaccctcccgcgatgagctgaccaagaatcaggtgtctctgacatgtctggtgaagggcttttacccttccgacatcgccgtggagtgggagtctaacggccagccagagaacaattataagaccacacctccagtgctggacagcgatggctcctttttcctgtactctaagctgaccgtggacaagagcagatggcagcagggcaacgtgttctcttgcagcgtgatgcacgaggcactgcacaatcactacacccagaagtcactgtccctgtcccccggataaggatcc

SEQ ID NO: 75 - DNA, 2466 bp, synthetic construct
  source 1..2466: mol_type = other DNA
gaattcccgccgccaccatggagtttgggctgtcctgggtctttctggtcgcaatcctgaagggcgtgcagtgttccgaatcccccgtcacaatctcaagggcaggaaatgcaggagagctggtgtccccactgctgctgccacctacccggagaaggcgccggagacacatccagggaccaggacctgtgctgaacctgccaagcgccgccgccgccccacccgtggcaagggcaccagaggcagcaggaggaggcagccgctccgaggactatagctcctctccccactccgccgcagcagcagcaaggcctctggcagccgaggagaagcaggcccagtctctgcagcccagctcctctaggcgcagctcccactaccctgcagcagtgcagagccaggcagcagcagagaggggagcatccgccaccgccaagtctcgcgccatcagcatcctgcagaagaagccaaggcaccagcagctgctgccttccctgtctagcttctttttctctcacaggctgcccgatatgaccgccatcatcaaggagatcgtgtcccgcaataagcggagatatcaggaggacggctttgacctggatctgacatatatctaccctaacatcatcgccatgggattcccagcagagcggctggagggcgtgtacagaaacaatatcgacgatgtggtgaggtttctggatagcaagcacaagaaccactataagatctacaatctgtgcgccgagcggcactatgacaccgccaagtttaactgtagagtggcccagtaccccttcgaggatcacaatcctccacagctggagctgatcaagcctttctgcgaggacctggatcagtggctgtccgaggacgataatcacgtggcagcaatccactgcaaggcaggcaagggaaggacaggcgtgatgatctgtgcctatctgctgcacaggggcaagtttctgaaggcccaggaggccctggacttctacggcgaggtgaggacccgcgataagaagggcgtgacaatcccttctcagcggcggtacgtgtactattacagctacctgctgaagaaccacctggactaccgcccagtggccctgctgtttcacaagatgatgttcgagaccatcccaatgttttctggcggcacatgcaacccccagttcgtggtgtgccagctgaaggtgaagatctattcctctaatagcggccccacccggagagaggacaagttcatgtactttgagttcccacagccactgcccgtgtgcggcgatatcaaggtggagtttttccacaagcagaacaagatgctgaagaaggacaagatgtttcacttctgggtgaatacctttttcatcccaggccccgaggagacaagcgagaaggtggagaatggctccctgtgcgaccaggagatcgattccatctgttctatcgagcgggccgacaacgataaggagtacctggtgctgaccctgacaaagaatgacctggataaggccaacaaggacaaggccaatagatacttcagccctaacttcaaggtgaagctgtactttaccaagacagtggaggagccctccaatcctgaggccagctcctctaccagcgtgacaccagacgtgtccgataacgagcccgaccactatcggtactccgataccacagactctgatcctgagaatgagccattcgacgaggatcagcacacccagatcacaaaggtgcaccaccaccaccaccacgagccaaagagctccgataagacccacacatgcccaccttgcccagcaccagagctgctgggaggccctagcgtgtttctgttcccccctaagccaaaggataccctgatgatcagcagaaccccagaggtgacatgcgtggtggtggacgtgtcccacgaggaccccgaggtgaagttcaactggtacgtggacggcgtggaggtgcacaatgccaagacaaagccccgggaggagcagtatcagtctacctacagagtggtgagcgtgctgacagtgctgcaccaggattggctgaacggcaaggagtacaagtgcaaggtgtctaataaggccctgcctgccccaatcgagaagaccatcagcaaggcaaagggacagccaagggagccacaggtgtatacactgccaccctcccgcgatgagctgaccaagaatcaggtgtctctgacatgtctggtgaagggcttttacccttccgacatcgccgtggagtgggagtctaacggccagccagagaacaattataagaccacacctccagtgctggacagcgatggctcctttttcctgtactctaagctgaccgtggacaagagcagatggcagcagggcaacgtgttctcttgcagcgtgatgcacgaggcactgcacaatcactacacccagaagtcactgtccctgtcccccggataataagcttggatcc

SEQ ID NO: 76 - DNA, 2420 bp, synthetic construct
  source 1..2420: mol_type = other DNA
gaattcccgccgccaccatggagtttgggctgtcctgggtcttcctggtcgcaatcctgaaaggcgtgcagtgtccctgtcccgcacctgagctgctgggcggacctagcgtgtttctgttcccccctaagccaaaggataccctgatgatctctcggacccctgaggtgacatgcgtggtggtggacgtgagccacgaggaccccgaggtgaagttcaactggtacgtggacggcgtggaggtgcacaatgccaagacaaagcccagggaggagcagtataactctacctaccgcgtggtgagcgtgctgacagtgctgcaccaggactggctgaacggcaaggagtacaagtgcaaggtgtccaataaggccctgcccgcccctatcgagaagaccatctctaaggcaaagggacagccaagggagcctcaggtgtatacactgccacccagccgcgatgagctgaccaagaatcaggtgtccctgacatgtctggtgaagggcttttacccaagcgacatcgcagtggagtgggagtccaacggacagcccgagaacaattataagaccacacctccagtgctggacagcgatggctccttctttctgtacagcaagctgaccgtggataagtccaggtggcagcagggcaacgtgttcagctgttccgtgatgcacgaggccctgcacaatcactacacacagaagtctctgagcctgtccccaggaggaggaggaggctctatcagcagggcaggaaatgcaggagagctggtgagcccactgctgctgccacctacccggagaaggcgccggagacacatccagggaccaggacccgtgctgaacctgccatccgccgcagcagcaccaccagtggccagggcccctgaggccgccggcggcggctcccgctctgaggactatagctcctctccccacagcgccgcagcagcagcaaggcctctggcagcagaggagaagcaggcacagtccctgcagcctagctcctctaggcgcagctcccactacccagcagcagtgcagtctcaggcagcagcagagaggggagcaagcgccaccgccaagtccagagccatctctatcctgcagaagaagcctagacaccagcagctgctgccatctctgtctagcttctttttcagccacaggctgcccgatatgaccgccatcatcaaggagatcgtgagccgcaataagcggagatatcaggaggacggctttgacctggatctgacatatatctacccaaacatcatcgccatgggattcccagcagagcggctggagggcgtgtacagaaacaatatcgacgatgtggtgaggtttctggattccaagcacaagaaccactataagatctacaatctgtgcgccgagcggcactatgacaccgccaagtttaactgtagagtggcccagtaccccttcgaggatcacaatcctccacagctggagctgatcaagcctttctgcgaggacctggatcagtggctgagcgaggacgataatcacgtggcagcaatccactgcaaggcaggcaagggaaggacaggcgtgatgatctgtgcctatctgctgcacaggggcaagtttctgaaggcccaggaggccctggacttctacggcgaggtgaggacccgcgataagaagggcgtgacaatcccttcccagcggcggtacgtgtactattactcttacctgctgaagaaccacctggactaccgcccagtggccctgctgtttcacaagatgatgttcgagaccatcccaatgtttagcggcggcacatgcaacccccagttcgtggtgtgccagctgaaggtgaagatctattcctctaattccggccccacccggagagaggacaagtttatgtactttgagttccctcagccactgcccgtgtgcggcgatatcaaggtggagtttttccacaagcagaacaagatgctgaagaaggacaagatgtttcacttctgggtgaatacctttttcatccctggcccagaggagacatccgagaaggtggagaatggctctctgtgcgaccaggagatcgattctatctgtagcatcgagcgggccgacaacgataaggagtacctggtgctgaccctgacaaagaatgacctggataaggccaacaaggacaaggccaatagatatttttctcccaacttcaaggtgaagctgtacttcaccaagacagtggaggagccatccaatcccgaggccagctcctctacctccgtgacacccgacgtgtctgataacgagcctgaccactataggtacagcgataccacagactccgatcctgagaacgagccatttgacgaagaccagcatactcagattactaaagtccaccatcaccaccaccattgaggatcc

SEQ ID NO: 77 - DNA, 3018 bp, synthetic construct
  source 1..3018: mol_type = other DNA
gaattcccgccgccaccatgaagtgggtcacctttatttccctgctgttcctgtttagctccgcttactcaagaggcgtgttccgacggtatccttatgatgtccccgactacgcctgcatgaccgccatcatcaaggagatcgtgagccggaacaagcggagatatcaggaggatggctttgacctggatctgacatacatctatccaaatatcatcgccatgggattcccagcagagcggctggagggcgtgtacagaaacaatatcgacgatgtggtgagatttctggactccaagcacaagaaccactacaagatctataatctgtgcgccgagaggcactacgacaccgccaagtttaactgtcgcgtggcccagtatcctttcgaggatcacaatccccctcagctggagctgatcaagccattctgtgaggacctggatcagtggctgagcgaggacgataaccacgtggcagcaatccactgcaaggcaggcaagggaaggacaggcgtgatgatctgtgcctacctgctgcacaggggcaagtttctgaaggcccaggaggccctggacttctatggcgaggtgcggaccagagataagaagggcgtgacaatcccaagccagaggcgctacgtgtactattactcctatctgctgaagaatcacctggattacaggcccgtggccctgctgtttcacaagatgatgttcgagacaatccccatgttttctggcggcacatgcaaccctcagttcgtggtgtgccagctgaaggtgaagatctacagctccaatagcggccccacccggagagaggacaagttcatgtattttgagttcccacagccactgcccgtgtgcggcgatatcaaggtggagttctttcacaagcagaacaagatgctgaagaaggacaagatgtttcacttctgggtgaataccttctttatcccaggccccgaggagacaagcgagaaggtggagaacggctccctgtgcgaccaggagatcgattccatctgttctatcgagagggccgacaacgataaggagtacctggtgctgaccctgacaaagaatgacctggataaggccaacaaggacaaggccaatcgctacttttctccaaacttcaaggtgaagctgtacttcaccaagacagtggaggagccaagcaatcccgaggcctctagctccacctctgtgacaccagacgtgagcgataacgagcccgaccactacaggtattccgataccacagactctgatcccgagaacgagcctttcgacgaggatcagcacacccagatcacaaaagtgggaggaggaggcagccgcgcaggaaatgcaggagagctggtgtccccactgctgctgccaccaaccaggcgccggagaaggcgccacatccagggacctggaccagtgctgaacctgccaagcgccgccgccgcccctccagtggcaagggcaccagaggcagcaggaggaggctctagaagcgaggactactctagctccccacactccgccgcagcagcagccaggcccctggcagccgaggagaagcaggcccagtctctgcagccctctagctcccggagatctagccactatcctgccgccgtgcagtctcaggcagcagcagagaggggagcaagcgccaccgccaagtctagagccatcagcatcctgcagaagaagcctcgccaccagcagctgctgccatctctgtcctctttctttttcagccaccggctgcctgatatgactgctatcatcaaggaaatcgtgagcagaaacaagaggcgctaccaggaagacggattcgacctggatctgacctatatctatcctaacattattgctatgggctttccagcagagaggctggagggcgtgtatcgcaataacatcgacgatgtggtgcggtttctggatagcaaacataaaaatcattataaaatctataatctgtgcgctgaaagacattatgatactgctaagtttaactgccgcgtggcccagtatcccttcgaggaccataaccctccacagctggaactgatcaagcctttctgcgaagacctggaccagtggctgtctgaagatgacaatcatgtcgccgccattcattgtaaggcaggcaagggcagaaccggcgtgatgatttgcgcctacctgctgcaccgcggcaagtttctgaaagctcaagaggccctggacttctatggtgaggtgaggacccgcgacaaaaagggcgtgacaatcccttcccagcggagatacgtgtattactattcttatctgctgaagaaccacctggactacagaccagtggccctgctgttccataaaatgatgtttgagacaatccctatgttttccggcggcacatgcaatccacagtttgtggtgtgccagctgaaggtaaagatctacagctccaactctggaccaaccaggagggaggataagttcatgtacttcgagttcccacagcctctgcccgtgtgcggcgacatcaaggtggagtttttccataaacaaaacaagatgctgaagaaggataaaatgttccatttttgggtgaatacctttttcatccccggccctgaggagacatccgaaaaagtggagaacggctctctgtgcgatcaggaaatcgatagcatctgttccatcgagagagctgataatgacaaagaatacctggtgctgaccctgacgaaaaacgacctggacaaagctaacaaggataaggccaatagatactttagccccaatttcaaggtgaagctgtatttcaccaaaaccgtggaggagccttccaacccagaggcctcttcctccacctccgtgacacccgacgtgtctgataatgagcctgaccactacagatatagcgataccacagactccgatcctgagaatgagccatttgacgaggaccagcatacccagattactaaagtgcatcatcaccaccaccattgataagcttggatcc

SEQ ID NO: 78 - DNA, 3509 bp, synthetic construct
  source 1..3509: mol_type = other DNA
gaattcccgccgccaccatgaaatgggtcacctttatcagtctgctgttcctgttctccagtgcttattctaggggcgtgtttaggcgggatgctcacaagtccgaggtggcccaccgctttaaggatctgggcgaggagaacttcaaggccctggtgctgatcgcctttgcccagtacctgcagcagtgccccttcgaggaccacgtgaagctggtgaacgaggtgaccgagtttgccaagacatgcgtggccgacgagagcgccgagaattgtgataagtccctgcacaccctgttcggcgataagctgtgcaccgtggccacactgcgcgagacatatggcgagatggccgactgctgtgccaagcaggagccagagcggaacgagtgctttctgcagcacaaggacgataacccaaatctgcccagactggtgaggcccgaggtggacgtgatgtgcaccgcctttcacgataatgaggagacattcctgaagaagtacctgtatgagatcgcccggagacacccttacttctatgccccagagctgctgttctttgccaagagatacaaggccgcctttaccgagtgctgtcaggcagcagataaggcagcatgcctgctgccaaagctggacgagctgagagatgagggcaaggccagctccgccaagcagaggctgaagtgtgcctccctgcagaaatttggcgagcgcgccttcaaggcctgggcagtggcaaggctgtcccagcggtttccaaaggccgagttcgccgaggtgtctaagctggtgaccgacctgacaaaggtgcacaccgagtgctgtcacggcgacctgctggagtgcgcagacgatagggcagatctggccaagtacatctgtgagaaccaggactccatctctagcaagctgaaggagtgctgtgagaagcccctgctggagaagtctcactgcatcgccgaggtggagaacgacgagatgccagcagatctgcctagcctggcagcagacttcgtggagtccaaggacgtgtgcaagaattacgccgaggccaaggacgtgttcctgggcatgttcctgtacgagtatgccaggcgccaccctgactacagcgtggtgctgctgctgcgcctggccaagacctatgagaccacactggagaagtgctgtgccgccgccgatccacacgagtgctatgccaaggtgtttgacgagttcaagcccctggtggaggagcctcagaacctgatcaagcagaattgtgagctgttcgagcagctgggcgagtacaagtttcagaacgccctgctggtgcggtatacaaagaaggtgccacaggtgtctacccccacactggtggaggtgagcagaaatctgggcaaggtcggctccaagtgctgtaagcaccctgaggccaagaggatgccatgcgccgaggattacctgtctgtggtgctgaatcagctgtgcgtgctgcacgagaagacccccgtgagcgacagagtgaccaagtgctgtacagagtccctggtgaaccggagaccttgcttctctgccctggaggtggatgagacatatgtgccaaaggagtttaatgccgagacctttacattccacgccgacatctgtaccctgagcgagaaggagaggcagatcaagaagcagacagccctggtggagctggtgaagcacaagcctaaggccaccaaggagcagctgaaggccgtgatggacgattttgccgccttcgtggagaagtgctgtaaggccgacgataaggagacatgcttcgcagaggagggcaagaagctggtggcagcatctcaggccgccctgggactgatcagcagagcaggaaacgcaggagagctggtgtccccactgctgctgccacctaccaggcgccggagaaggcgccacatccagggaccaggacccgtgctgaatctgccaagcgccgccgccgccccacccgtggcaagagcaccagaggcagcaggaggaggctctaggagcgaggactactcctctagccctcacagcgccgcagcagcagcaaggccactggcagcagaggagaagcaggcacagtccctgcagccatcctctagccggagatcctctcactatcctgccgccgtgcagagccaggcagcagcagagaggggagcatccgccaccgccaagtcccgggccatctctatcctgcagaagaagccacgccaccagcagctgctgccctctctgagctccttctttttcagccacaggctgccagatggaggaggaggctccatggaggagccacagtctgaccccagcgtggagcctccactgtctcaggagacattcagcgacctgtggaagctgctgcccgagaacaatgtgctgagccctctgccatcccaggccatggacgatctgatgctgagccctgacgatatcgagcagtggtttaccgaggaccccggacctgatgaggcacctagaatgccagaggcagcaccacctgtggcaccagcaccagccgcccctacaccagccgcccccgcccctgccccatcctggcccctgtctagctccgtgccttcccagaagacctaccagggctcttatggctttaggctgggcttcctgcactccggcacagccaagtctgtgacctgcacatacagcccagccctgaacaagatgttctgccagctggccaagacctgtcccgtgcagctgtgggtggattctaccccaccacctggaacacgggtgagagcaatggcaatctataagcagagccagcacatgacagaggtggtgaggcgctgcccacaccacgagcggtgttccgactctgatggactggcaccaccacagcacctgatcagggtggagggcaacctgcgggtggagtacctggacgatagaaataccttcaggcacagcgtggtggtgccctatgagcctccagaagtgggctccgactgcaccacaatccactacaactatatgtgcaattctagctgtatgggcggcatgaaccggagacctatcctgaccatcatcacactggaggattcctctggcaacctgctgggcagaaattcctttgaggtgagggtgtgcgcatgtcctggaagggacaggaggaccgaggaggagaatctgcggaagaagggagagccacaccacgagctgccacctggcagcaccaagcgcgccctgcccaacaatacaagctcctctccccagcccaagaagaagcctctggatggcgagtacttcacactgcagatcaggggccgcgagcggtttgagatgttccgggagctgaatgaggccctggagctgaaggacgcacaggcaggcaaggagcctggaggctctagagcccacagctcccacctgaagagcaagaagggccagagcacctccaggcacaagaaactgatgttcaaaactgagggacccgattccgaccaccaccaccaccaccactaaaagcttggatcc

SEQ ID NO: 79 - protein, 580 aa, synthetic construct
MKRMKSLAAALTVAGAMLAAPVATASESPVTISRAGNAGELVSPLLLPPTRRRRRRHIQGPGPVLNLPSAAAAPPVARAPEAAGGGSRSEDYSSSPHSAAAAARPLAAEEKQAQSLQPSSSRRSSHYPAAVQSQAAAERGASATAKSRAISILQKKPRHQQLLPSLSSFFFSHRLPDMTAIIKEIVSRNKRRYQEDGFDLDLTYIYPNIIAMGFPAERLEGVYRNNIDDVVRFLDSKHKNHYKIYNLCAERHYDTAKFNCRVAQYPFEDHNPPQLELIKPFCEDLDQWLSEDDNHVAAIHCKAGKGRTGVMICAYLLHRGKFLKAQEALDFYGEVRTRDKKGVTIPSQRRYVYYYSYLLKNHLDYRPVALLFHKMMFETIPMFSGGTCNPQFVVCQLKVKIYSSNSGPTRREDKFMYFEFPQPLPVCGDIKVEFFHKQNKMLKKDKMFHFWVNTFFIPGPEETSEKVENGSLCDQEIDSICSIERADNDKEYLVLTLTKNDLDKANKDKANRYFSPNFKVKLYFTKTVEEPSNPEASSSTSVTPDVSDNEPDHYRYSDTTDSDPENEPFDEDQHTQITKV

SEQ ID NO: 80 - protein, 591 aa, synthetic construct
MFNNRIRTAALAGAIAISTAASGVAIPAFAAETNPTSESPVTISRAGNAGELVSPLLLPPTRRRRRRHIQGPGPVLNLPSAAAAPPVARAPEAAGGGSRSEDYSSSPHSAAAAARPLAAEEKQAQSLQPSSSRRSSHYPAAVQSQAAAERGASATAKSRAISILQKKPRHQQLLPSLSSFFFSHRLPDMTAIIKEIVSRNKRRYQEDGFDLDLTYIYPNIIAMGFPAERLEGVYRNNIDDVVRFLDSKHKNHYKIYNLCAERHYDTAKFNCRVAQYPFEDHNPPQLELIKPFCEDLDQWLSEDDNHVAAIHCKAGKGRTGVMICAYLLHRGKFLKAQEALDFYGEVRTRDKKGVTIPSQRRYVYYYSYLLKNHLDYRPVALLFHKMMFETIPMFSGGTCNPQFVVCQLKVKIYSSNSGPTRREDKFMYFEFPQPLPVCGDIKVEFFHKQNKMLKKDKMFHFWVNTFFIPGPEETSEKVENGSLCDQEIDSICSIERADNDKEYLVLTLTKNDLDKANKDKANRYFSPNFKVKLYFTKTVEEPSNPEASSSTSVTPDVSDNEPDHYRYSDTTDSDPENEPFDEDQHTQITKV

SEQ ID NO: 81 - protein, 594 aa, synthetic construct
MNNNDLFQASRRRFLAQLGGLTVAGMLGPSLLTPRRATASESPVTISRAGNAGELVSPLLLPPTRRRRRRHIQGPGPVLNLPSAAAAPPVARAPEAAGGGSRSEDYSSSPHSAAAAARPLAAEEKQAQSLQPSSSRRSSHYPAAVQSQAAAERGASATAKSRAISILQKKPRHQQLLPSLSSFFFSHRLPDMTAIIKEIVSRNKRRYQEDGFDLDLTYIYPNIIAMGFPAERLEGVYRNNIDDVVRFLDSKHKNHYKIYNLCAERHYDTAKFNCRVAQYPFEDHNPPQLELIKPFCEDLDQWLSEDDNHVAAIHCKAGKGRTGVMICAYLLHRGKFLKAQEALDFYGEVRTRDKKGVTIPSQRRYVYYYSYLLKNHLDYRPVALLFHKMMFETIPMFSGGTCNPQFVVCQLKVKIYSSNSGPTRREDKFMYFEFPQPLPVCGDIKVEFFHKQNKMLKKDKMFHFWVNTFFIPGPEETSEKVENGSLCDQEIDSICSIERADNDKEYLVLTLTKNDLDKANKDKANRYFSPNFKVKLYFTKTVEEPSNPEASSSTSVTPDVSDNEPDHYRYSDTTDSDPENEPFDEDQHTQITKV

SEQ ID NO: 82 - protein, 586 aa, synthetic construct
MKLSKRGLFWLLGLVSFAILLLFSQPLGAQASESPVTISRAGNAGELVSPLLLPPTRRRRRRHIQGPGPVLNLPSAAAAPPVARAPEAAGGGSRSEDYSSSPHSAAAAARPLAAEEKQAQSLQPSSSRRSSHYPAAVQSQAAAERGASATAKSRAISILQKKPRHQQLLPSLSSFFFSHRLPDMTAIIKEIVSRNKRRYQEDGFDLDLTYIYPNIIAMGFPAERLEGVYRNNIDDVVRFLDSKHKNHYKIYNLCAERHYDTAKFNCRVAQYPFEDHNPPQLELIKPFCEDLDQWLSEDDNHVAAIHCKAGKGRTGVMICAYLLHRGKFLKAQEALDFYGEVRTRDKKGVTIPSQRRYVYYYSYLLKNHLDYRPVALLFHKMMFETIPMFSGGTCNPQFVVCQLKVKIYSSNSGPTRREDKFMYFEFPQPLPVCGDIKVEFFHKQNKMLKKDKMFHFWVNTFFIPGPEETSEKVENGSLCDQEIDSICSIERADNDKEYLVLTLTKNDLDKANKDKANRYFSPNFKVKLYFTKTVEEPSNPEASSSTSVTPDVSDNEPDHYRYSDTTDSDPENEPFDEDQHTQITKV

SEQ ID NO: 83 - protein, 582 aa, synthetic construct
MKEVRFWGLLLGLFVCLGAVIPLVSKASESPVTISRAGNAGELVSPLLLPPTRRRRRRHIQGPGPVLNLPSAAAAPPVARAPEAAGGGSRSEDYSSSPHSAAAAARPLAAEEKQAQSLQPSSSRRSSHYPAAVQSQAAAERGASATAKSRAISILQKKPRHQQLLPSLSSFFFSHRLPDMTAIIKEIVSRNKRRYQEDGFDLDLTYIYPNIIAMGFPAERLEGVYRNNIDDVVRFLDSKHKNHYKIYNLCAERHYDTAKFNCRVAQYPFEDHNPPQLELIKPFCEDLDQWLSEDDNHVAAIHCKAGKGRTGVMICAYLLHRGKFLKAQEALDFYGEVRTRDKKGVTIPSQRRYVYYYSYLLKNHLDYRPVALLFHKMMFETIPMFSGGTCNPQFVVCQLKVKIYSSNSGPTRREDKFMYFEFPQPLPVCGDIKVEFFHKQNKMLKKDKMFHFWVNTFFIPGPEETSEKVENGSLCDQEIDSICSIERADNDKEYLVLTLTKNDLDKANKDKANRYFSPNFKVKLYFTKTVEEPSNPEASSSTSVTPDVSDNEPDHYRYSDTTDSDPENEPFDEDQHTQITKV

SEQ ID NO: 84 - protein, 1246 aa, synthetic construct
MRFPSIFTAVLFAASSALAAPVNTTTEDETAQIPAEAVIGYSDLEGDFDVAVLPFSNSTNNGLLFINTTIASIAAKEEGVSLEKRDAHKSEVAHRFKDLGEENFKALVLIAFAQYLQQCPFEDHVKLVNEVTEFAKTCVADESAENCDKSLHTLFGDKLCTVATLRETYGEMADCCAKQEPERNECFLQHKDDNPNLPRLVRPEVDVMCTAFHDNEETFLKKYLYEIARRHPYFYAPELLFFAKRYKAAFTECCQAADKAACLLPKLDELRDEGKASSAKQRLKCASLQKFGERAFKAWAVARLSQRFPKAEFAEVSKLVTDLTKVHTECCHGDLLECADDRADLAKYICENQDSISSKLKECCEKPLLEKSHCIAEVENDEMPADLPSLAADFVESKDVCKNYAEAKDVFLGMFLYEYARRHPDYSVVLLLRLAKTYETTLEKCCAAADPHECYAKVFDEFKPLVEEPQNLIKQNCELFEQLGEYKFQNALLVRYTKKVPQVSTPTLVEVSRNLGKVGSKCCKHPEAKRMPCAEDYLSVVLNQLCVLHEKTPVSDRVTKCCTESLVNRRPCFSALEVDETYVPKEFNAETFTFHADICTLSEKERQIKKQTALVELVKHKPKATKEQLKAVMDDFAAFVEKCCKADDKETCFAEEGKKLVAASQAALGLGPAALKAATNRRKKRALDAAYISRAGNAGELVSPLLLPPTRRRRRRHIQGPGPVLNLPSAAAAPPVARAPEAAGGGSRSEDYSSSPHSAAAAARPLAAEEKQAQSLQPSSSRRSSHYPAAVQSQAAAERGASATAKSRAISILQKKPRHQQLLPSLSSFFFSHRLPDMTAIIKEIVSRNKRRYQEDGFDLDLTYIYPNIIAMGFPAERLEGVYRNNIDDVVRFLDSKHKNHYKIYNLCAERHYDTAKFNCRVAQYPFEDHNPPQLELIKPFCEDLDQWLSEDDNHVAAIHCKAGKGRTGVMICAYLLHRGKFLKAQEALDFYGEVRTRDKKGVTIPSQRRYVYYYSYLLKNHLDYRPVALLFHKMMFETIPMFSGGTCNPQFVVCQLKVKIYSSNSGPTRREDKFMYFEFPQPLPVCGDIKVEFFHKQNKMLKKDKMFHFWVNTFFIPGPEETSEKVENGSLCDQEIDSICSIERADNDKEYLVLTLTKNDLDKANKDKANRYFSPNFKVKLYFTKTVEEPSNPEASSSTSVTPDVSDNEPDHYRYSDTTDSDPENEPFDEDQHTQITKVHHHHHH

SEQ ID NO: 85 - protein, 613 aa, synthetic construct
MRFPSIFTAVLFAASSALAAPVNTTTEDELEGDFDVAVLPFSASIAAKEEGVSLEKRMSESPVTISRAGNAGELVSPLLLPPTRRRRRRHIQGPGPVLNLPSAAAAPPVARAPEAAGGGSRSEDYSSSPHSAAAAARPLAAEEKQAQSLQPSSSRRSSHYPAAVQSQAAAERGASATAKSRAISILQKKPRHQQLLPSLSSFFFSHRLPDMTAIIKEIVSRNKRRYQEDGFDLDLTYIYPNIIAMGFPAERLEGVYRNNIDDVVRFLDSKHKNHYKIYNLCAERHYDTAKFNCRVAQYPFEDHNPPQLELIKPFCEDLDQWLSEDDNHVAAIHCKAGKGRTGVMICAYLLHRGKFLKAQEALDFYGEVRTRDKKGVTIPSQRRYVYYYSYLLKNHLDYRPVALLFHKMMFETIPMFSGGTCNPQFVVCQLKVKIYSSNSGPTRREDKFMYFEFPQPLPVCGDIKVEFFHKQNKMLKKDKMFHFWVNTFFIPGPEETSEKVENGSLCDQEIDSICSIERADNDKEYLVLTLTKNDLDKANKDKANRYFSPNFKVKLYFTKTVEEPSNPEASSSTSVTPDVSDNEPDHYRYSDTTDSDPENEPFDEDQHTQITKV

SEQ ID NO: 86 - DNA, 2097 bp, synthetic construct
  source 1..2097: mol_type = other DNA
gaattcgccgccaccatggtttcggcaatcgtcctctacgttctcctggctgctgcggctcattcggctttcgcctcggacaaaatcatccacctcactgacgactccttcgacactgacgtcctgaaggctgacggtgctatcctggtggacttctgggcccactggtgcggtccatgcaagatgatcgctccaatcctggacgagatcgccgacgaataccagggcaagctgactgtcgctaagctgaacatcgaccacaacccaggtaccgccccaaagtacggtatccgtggtatccccactctgctgctgttcaagaacggagaagtggccgctaccaaggtcggtgctctgtcaaagggacagctgaaggagttcctggacgctaacctggctgagaacctgtacttccagggtatcagcagagctggcaacgccggtgaactggtctccccactgctgctgccacctacccgtagacgcaggcgtagacacatccagggaccaggtcctgtcctgaacctgccttcagctgctgccgctcctccagtcgccagagctccagaggctgccggaggcggttctcgttccgaggactactcctctagccctcactccgctgccgctgctgctagaccactggccgctgaagagaagcaggcccagagcctgcagccatccagctcaaggcgtagctctcactaccctgctgccgtccagtcacaggctgctgccgaaagaggcgcttccgccaccgctaagtccagagctatctccatcctgcagaagaagccacgtcaccagcagctgctgccctctctgtccagcttcttcttctcacaccgtctgccagacatgaccgccatcatcaaggagatcgtcagcagaaacaagcgtagataccaggaggacggtttcgacctggacctgacttacatctacccaaacatcatcgctatgggtttccccgctgaaaggctggagggtgtctaccgtaacaacatcgacgacgtcgtgagattcctggacagcaagcacaagaaccactacaagatctacaacctgtgcgctgagagacactacgacaccgctaagttcaactgccgtgtggctcagtacccattcgaggaccacaacccccctcagctggagctgatcaagcctttctgcgaagacctggaccagtggctgtccgaggacgacaaccacgtggctgccatccactgcaaggctggcaagggtaggaccggtgtgatgatctgcgcttacctgctgcaccgcggaaagttcctgaaggctcaggaggccctggacttctacggcgaagtgagaacccgtgacaagaagggtgtgaccatcccttcccagcgtagatacgtgtactactacagctacctgctgaagaaccacctggactacagacccgtggccctgctgttccacaagatgatgttcgagactatccccatgttctccggaggtacctgcaacccacagttcgtggtctgccagctgaaggtgaagatctactcctctaactccggacctactagacgtgaagacaagttcatgtacttcgagttcccccagccactgcctgtgtgcggtgacatcaaggtggagttcttccacaagcagaacaagatgctgaagaaggacaagatgttccacttctgggtcaacaccttcttcatccctggtccagaagaaacttccgaaaaggtcgagaacggtagcctgtgcgaccaggagatcgactccatctgctccatcgaacgtgccgacaacgacaaggagtacctggtgctgactctgaccaagaacgacctggacaaggctaacaaggacaaggccaacagatacttctcccccaacttcaaggtgaagctgtacttcactaagaccgtcgaagagccatccaacccagaagccagcagctccacctccgtcactcctgacgtctcagacaacgaaccagaccactacagatacagcgacaccactgactccgaccccgagaacgagccattcgacgaggaccaacatactcagattaccaaagttcatcatcatcatcaccattaatgaaagctt

SEQ ID NO: 87 - protein, 690 aa, synthetic construct
MVSAIVLYVLLAAAAHSAFASDKIIHLTDDSFDTDVLKADGAILVDFWAHWCGPCKMIAPILDEIADEYQGKLTVAKLNIDHNPGTAPKYGIRGIPTLLLFKNGEVAATKVGALSKGQLKEFLDANLAENLYFQGISRAGNAGELVSPLLLPPTRRRRRRHIQGPGPVLNLPSAAAAPPVARAPEAAGGGSRSEDYSSSPHSAAAAARPLAAEEKQAQSLQPSSSRRSSHYPAAVQSQAAAERGASATAKSRAISILQKKPRHQQLLPSLSSFFFSHRLPDMTAIIKEIVSRNKRRYQEDGFDLDLTYIYPNIIAMGFPAERLEGVYRNNIDDVVRFLDSKHKNHYKIYNLCAERHYDTAKFNCRVAQYPFEDHNPPQLELIKPFCEDLDQWLSEDDNHVAAIHCKAGKGRTGVMICAYLLHRGKFLKAQEALDFYGEVRTRDKKGVTIPSQRRYVYYYSYLLKNHLDYRPVALLFHKMMFETIPMFSGGTCNPQFVVCQLKVKIYSSNSGPTRREDKFMYFEFPQPLPVCGDIKVEFFHKQNKMLKKDKMFHFWVNTFFIPGPEETSEKVENGSLCDQEIDSICSIERADNDKEYLVLTLTKNDLDKANKDKANRYFSPNFKVKLYFTKTVEEPSNPEASSSTSVTPDVSDNEPDHYRYSDTTDSDPENEPFDEDQHTQITKVHHHHHH

SEQ ID NO: 88 - protein, 403 aa, Mus sp.
MTAIIKEIVSRNKRRYQEDGFDLDLTYIYPNIIAMGFPAERLEGVYRNNIDDVVRFLDSKHKNHYKIYNLCAERHYDTAKFNCRVAQYPFEDHNPPQLELIKPFCEDLDQWLSEDDNHVAAIHCKAGKGRTGVMICAYLLHRGKFLKAQEALDFYGEVRTRDKKGVTIPSQRRYVYYYSYLLKNHLDYRPVALLFHKMMFETIPMFSGGTCNPQFVVCQLKVKIYSSNSGPTRREDKFMYFEFPQPLPVCGDIKVEFFHKQNKMLKKDKMFHFWVNTFFIPGPEETSEKVENGSLCDQEIDSICSIERADNDKEYLVLTLTKNDLDKANKDKANRYFSPNFKVKLYFTKTVEEPSNPEASSSTSVTPDVSDNEPDHYRYSDTTDSDPENEPFDEDQHSQITKV

SEQ ID NO: 89 - protein, 555 aa, Mus sp.
SESPVTIARAGNAGELLSPLLLPPTRRRRRRHVQGPGPVLSLPSAAAAPPLARAPEAAGGGSRCEDYPSSPHSAASAARPLAAEEKQAQSLQPSSSRRSSHYPAAVQGQAAAERGASATAKSRAISILQKKPRHQQLLPSLSSFFFSHRLPDMTAIIKEIVSRNKRRYQEDGFDLDLTYIYPNIIAMGFPAERLEGVYRNNIDDVVRFLDSKHKNHYKIYNLCAERHYDTAKFNCRVAQYPFEDHNPPQLELIKPFCEDLDQWLSEDDNHVAAIHCKAGKGRTGVMICAYLLHRGKFLKAQEALDFYGEVRTRDKKGVTIPSQRRYVYYYSYLLKNHLDYRPVALLFHKMMFETIPMFSGGTCNPQFVVCQLKVKIYSSNSGPTRREDKFMYFEFPQPLPVCGDIKVEFFHKQNKMLKKDKMFHFWVNTFFIPGPEETSEKVENGSLCDQEIDSICSIERADNDKEYLVLTLTKNDLDKANKDKANRYFSPNFKVKLYFTKTVEEPSNPEASSSTSVTPDVSDNEPDHYRYSDTTDSDPENEPFDEDQHSQITKV

SEQ ID NO: 90 - protein, 584 aa, unidentified
DTHKSEVAHRFKDLGEEHFKGLVLVAFSQYLQQCPFEEHVKLVNEVTEFAKTCVADESAENCDKSLHTLFGDKLCTVATLRETYGEMADCCAKQEPERNECFLQHKDDNPNLPPLVRPEVDVMCTAFHDNEATFLKKYLYEVARRHPYFYAPELLFFAARYKAAFAECCQAADKAACLLPKLDELRDEGKASSAKQRLKCASLQKFGDRAFKAWAVARLSQKFPKAEFAEVSKLVTDLTKVHTECCHGDLLECADDRADLAKYMCENQDSISSKLKECCDKPLLEKSHCLAEVENDEMPADLPSLAADYVESKDVCKNYAEAKDVFLGMFLYEYARRHPDYSVMLLLRLAKAYEATLEKCCAAADPHECYAKVFDEFQPLVEEPQNLVKQNCELFEQLGEYKFQNALLVRYTKKVPQVSTPTLVEVSRNLGKVGAKCCKLPEAKRMPCAEDYLSVVLNRLCVLHEKTPVSEKVTKCCTESLVNRRPCFSALELDEAYVPKAFNAETFTFHADMCTLSEKEKQVKKQTALVELVKHKPKATKEQLKGVMDNFAAFVEKCCKADDKEACFAEEGPKFVAASQAALA

SEQ ID NO: 91 - protein, 584 aa, Rattus sp.
EAHKSEIAHRFKDLGEQHFKGLVLIAFSQYLQKCPYEEHIKLVQEVTDFAKTCVADENAENCDKSIHTLFGDKLCAIPKLRDNYGELADCCAKQEPERNECFLQHKDDNPNLPPFQRPEAEAMCTSFQENPTSFLGHYLHEVARRHPYFYAPELLYYAEKYNEVLTQCCTESDKAACLTPKLDAVKEKALVAAVRQRMKCSSMQRFGERAFKAWAVARMSQRFPNAEFAEITKLATDVTKINKECCHGDLLECADDRAELAKYMCENQATISSKLQACCDKPVLQKSQCLAEIEHDNIPADLPSIAADFVEDKEVCKNYAEAKDVFLGTFLYEYSRRHPDYSVSLLLRLAKKYEATLEKCCAEGDPPACYGTVLAEFQPLVEEPKNLVKTNCELYEKLGEYGFQNAVLVRYTQKAPQVSTPTLVEAARNLGRVGTKCCTLPEAQRLPCVEDYLSAILNRLCVLHEKTPVSEKVTKCCSGSLVERRPCFSALTVDETYVPKEFKAETFTFHSDICTLPDKEKQIKKQTALAELVKHKPKATEDQLKTVMGDFAQFVDKCCKAADKDNCFATEGPNLVARSKEALA

SEQ ID NO: 92 - protein, 584 aa, Mus sp.
EAHKSEIAHRYNDLGEQHFKGLVLIAFSQYLQKCSYDEHAKLVQEVTDFAKTCVADESAANCDKSLHTLFGDKLCAIPNLRENYGELADCCTKQEPERNECFLQHKDDNPSLPPFERPEAEAMCTSFKENPTTFMGHYLHEVARRHPYFYAPELLYYAEQYNEILTQCCAEADKESCLTPKLDGVKEKALVSSVRQRMKCSSMQKFGERAFKAWAVARLSQTFPNADFAEITKLATDLTKVNKECCHGDLLECADDRAELAKYMCENQATISSKLQTCCDKPLLKKAHCLSEVEHDTMPADLPAIAADFVEDQEVCKNYAEAKDVFLGTFLYEYSRRHPDYSVSLLLRLAKKYEATLEKCCAEANPPACYGTVLAEFQPLVEEPKNLVKTNCDLYEKLGEYGFQNAILVRYTQKAPQVSTPTLVEAARNLGRVGTKCCTLPEDQRLPCVEDYLSAILNRVCLLHEKTPVSEHVTKCCSGSLVERRPCFSALTVDETYVPKEFKAETFTFHSDICTLPEKEKQIKKQTALAELVKHKPKATAEQLKTVMDDFAQFLDTCCKAADKDTCFSTEGPNLVTRCKDALA

SEQ ID NO: 93 - protein, 24 aa, Homo sapiens
MKWVTFISLLFLFSSAYSRGVFRR

SEQ ID NO: 94 - protein, 24 aa, unidentified
MKWVTFISLLFLFSSAYSRGVFRR

SEQ ID NO: 95 - protein, 24 aa, Rattus sp.
MKWVTFLLLLFISGSAFSRGVFRR

SEQ ID NO: 96 - protein, 24 aa, Mus sp.
MKWVTFLLLLFVSGSAFSRGVFRR

SEQ ID NO: 97 - protein, 22 aa, Mus sp.
MRRNQLPTPAFLLLFLLLPRDA

SEQ ID NO: 98 - protein, 19 aa, Mus sp.
MLSLRVTCLILSVASTVWT

SEQ ID NO: 99 - protein, 24 aa, Mus sp.
MTPSISWGLLLLAGLCCLVPSFLA

SEQ ID NO: 100 - protein, 20 aa, Mus sp.
METDTLLLWVLLLWVPGSTG

SEQ ID NO: 101 - protein, 19 aa, Homo sapiens
MEFGLSWVFLVAILKGVQC

SEQ ID NO: 102 - protein, 20 aa, Homo sapiens
MVLQTQVFISLLLWISGAYG

SEQ ID NO: 103 - protein, 16 aa, Homo sapiens
MPLLLLLPLLWAGALA

SEQ ID NO: 104 - protein, 21 aa, synthetic construct
MWWRLWWLLLLLLLLWPMVWA

SEQ ID NO: 105 - protein, 23 aa, synthetic construct
MWWRLWWLLLLLLLLWPMVWAAA

SEQ ID NO: 106 - protein, 5 aa, synthetic construct
GGAGS

SEQ ID NO: 107 - protein, 4 aa, synthetic construct
GFVG

SEQ ID NO: 108 - protein, 5 aa, synthetic construct
FGFVG

SEQ ID NO: 109 - protein, 1168 aa, synthetic construct
MRRNQLPTPAFLLLFLLLPRDASESPVTISRAGNAGELVSPLLLPPTRRRRRRHIQGPGPVLNLPSAAAAPPVARAPEAAGGGSRSEDYSSSPHSAAAAARPLAAEEKQAQSLQPSSSRRSSHYPAAVQSQAAAERGASATAKSRAISILQKKPRHQQLLPSLSSFFFSHRLPDMTAIIKEIVSRNKRRYQEDGFDLDLTYIYPNIIAMGFPAERLEGVYRNNIDDVVRFLDSKHKNHYKIYNLCAERHYDTAKFNCRVAQYPFEDHNPPQLELIKPFCEDLDQWLSEDDNHVAAIHCKAGKGRTGVMICAYLLHRGKFLKAQEALDFYGEVRTRDKKGVTIPSQRRYVYYYSYLLKNHLDYRPVALLFHKMMFETIPMFSGGTCNPQFVVCQLKVKIYSSNSGPTRREDKFMYFEFPQPLPVCGDIKVEFFHKQNKMLKKDKMFHFWVNTFFIPGPEETSEKVENGSLCDQEIDSICSIERADNDKEYLVLTLTKNDLDKANKDKANRYFSPNFKVKLYFTKTVEEPSNPEASSSTSVTPDVSDNEPDHYRYSDTTDSDPENEPFDEDQHTQITKVDAHKSEVAHRFKDLGEENFKALVLIAFAQYLQQCPFEDHVKLVNEVTEFAKTCVADESAENCDKSLHTLFGDKLCTVATLRETYGEMADCCAKQEPERNECFLQHKDDNPNLPRLVRPEVDVMCTAFHDNEETFLKKYLYEIARRHPYFYAPELLFFAKRYKAAFTECCQAADKAACLLPKLDELRDEGKASSAKQRLKCASLQKFGERAFKAWAVARLSQRFPKAEFAEVSKLVTDLTKVHTECCHGDLLECADDRADLAKYICENQDSISSKLKECCEKPLLEKSHCIAEVENDEMPADLPSLAADFVESKDVCKNYAEAKDVFLGMFLYEYARRHPDYSVVLLLRLAKTYETTLEKCCAAADPHECYAKVFDEFKPLVEEPQNLIKQNCELFEQLGEYKFQNALLVRYTKKVPQVSTPTLVEVSRNLGKVGSKCCKHPEAKRMPCAEDYLSVVLNQLCVLHEKTPVSDRVTKCCTESLVNRRPCFSALEVDETYVPKEFNAETFTFHADICTLSEKERQIKKQTALVELVKHKPKATKEQLKAVMDDFAAFVEKCCKADDKETCFAEEGKKLVAASQAALGLHHHHHH

SEQ ID NO: 110 - protein, 1165 aa, synthetic construct
MLSLRVTCLILSVASTVWTSESPVTISRAGNAGELVSPLLLPPTRRRRRRHIQGPGPVLNLPSAAAAPPVARAPEAAGGGSRSEDYSSSPHSAAAAARPLAAEEKQAQSLQPSSSRRSSHYPAAVQSQAAAERGASATAKSRAISILQKKPRHQQLLPSLSSFFFSHRLPDMTAIIKEIVSRNKRRYQEDGFDLDLTYIYPNIIAMGFPAERLEGVYRNNIDDVVRFLDSKHKNHYKIYNLCAERHYDTAKFNCRVAQYPFEDHNPPQLELIKPFCEDLDQWLSEDDNHVAAIHCKAGKGRTGVMICAYLLHRGKFLKAQEALDFYGEVRTRDKKGVTIPSQRRYVYYYSYLLKNHLDYRPVALLFHKMMFETIPMFSGGTCNPQFVVCQLKVKIYSSNSGPTRREDKFMYFEFPQPLPVCGDIKVEFFHKQNKMLKKDKMFHFWVNTFFIPGPEETSEKVENGSLCDQEIDSICSIERADNDKEYLVLTLTKNDLDKANKDKANRYFSPNFKVKLYFTKTVEEPSNPEASSSTSVTPDVSDNEPDHYRYSDTTDSDPENEPFDEDQHTQITKVDAHKSEVAHRFKDLGEENFKALVLIAFAQYLQQCPFEDHVKLVNEVTEFAKTCVADESAENCDKSLHTLFGDKLCTVATLRETYGEMADCCAKQEPERNECFLQHKDDNPNLPRLVRPEVDVMCTAFHDNEETFLKKYLYEIARRHPYFYAPELLFFAKRYKAAFTECCQAADKAACLLPKLDELRDEGKASSAKQRLKCASLQKFGERAFKAWAVARLSQRFPKAEFAEVSKLVTDLTKVHTECCHGDLLECADDRADLAKYICENQDSISSKLKECCEKPLLEKSHCIAEVENDEMPADLPSLAADFVESKDVCKNYAEAKDVFLGMFLYEYARRHPDYSVVLLLRLAKTYETTLEKCCAAADPHECYAKVFDEFKPLVEEPQNLIKQNCELFEQLGEYKFQNALLVRYTKKVPQVSTPTLVEVSRNLGKVGSKCCKHPEAKRMPCAEDYLSVVLNQLCVLHEKTPVSDRVTKCCTESLVNRRPCFSALEVDETYVPKEFNAETFTFHADICTLSEKERQIKKQTALVELVKHKPKATKEQLKAVMDDFAAFVEKCCKADDKETCFAEEGKKLVAASQAALGLHHHHHH

SEQ ID NO: 111 - protein, 1170 aa, synthetic construct
MTPSISWGLLLLAGLCCLVPSFLASESPVTISRAGNAGELVSPLLLPPTRRRRRRHIQGPGPVLNLPSAAAAPPVARAPEAAGGGSRSEDYSSSPHSAAAAARPLAAEEKQAQSLQPSSSRRSSHYPAAVQSQAAAERGASATAKSRAISILQKKPRHQQLLPSLSSFFFSHRLPDMTAIIKEIVSRNKRRYQEDGFDLDLTYIYPNIIAMGFPAERLEGVYRNNIDDVVRFLDSKHKNHYKIYNLCAERHYDTAKFNCRVAQYPFEDHNPPQLELIKPFCEDLDQWLSEDDNHVAAIHCKAGKGRTGVMICAYLLHRGKFLKAQEALDFYGEVRTRDKKGVTIPSQRRYVYYYSYLLKNHLDYRPVALLFHKMMFETIPMFSGGTCNPQFVVCQLKVKIYSSNSGPTRREDKFMYFEFPQPLPVCGDIKVEFFHKQNKMLKKDKMFHFWVNTFFIPGPEETSEKVENGSLCDQEIDSICSIERADNDKEYLVLTLTKNDLDKANKDKANRYFSPNFKVKLYFTKTVEEPSNPEASSSTSVTPDVSDNEPDHYRYSDTTDSDPENEPFDEDQHTQITKVDAHKSEVAHRFKDLGEENFKALVLIAFAQYLQQCPFEDHVKLVNEVTEFAKTCVADESAENCDKSLHTLFGDKLCTVATLRETYGEMADCCAKQEPERNECFLQHKDDNPNLPRLVRPEVDVMCTAFHDNEETFLKKYLYEIARRHPYFYAPELLFFAKRYKAAFTECCQAADKAACLLPKLDELRDEGKASSAKQRLKCASLQKFGERAFKAWAVARLSQRFPKAEFAEVSKLVTDLTKVHTECCHGDLLECADDRADLAKYICENQDSISSKLKECCEKPLLEKSHCIAEVENDEMPADLPSLAADFVESKDVCKNYAEAKDVFLGMFLYEYARRHPDYSVVLLLRLAKTYETTLEKCCAAADPHECYAKVFDEFKPLVEEPQNLIKQNCELFEQLGEYKFQNALLVRYTKKVPQVSTPTLVEVSRNLGKVGSKCCKHPEAKRMPCAEDYLSVVLNQLCVLHEKTPVSDRVTKCCTESLVNRRPCFSALEVDETYVPKEFNAETFTFHADICTLSEKERQIKKQTALVELVKHKPKATKEQLKAVMDDFAAFVEKCCKADDKETCFAEEGKKLVAASQAALGLHHHHHH

SEQ ID NO: 112 - protein, 1166 aa, synthetic construct
METDTLLLWVLLLWVPGSTGSESPVTISRAGNAGELVSPLLLPPTRRRRRRHIQGPGPVLNLPSAAAAPPVARAPEAAGGGSRSEDYSSSPHSAAAAARPLAAEEKQAQSLQPSSSRRSSHYPAAVQSQAAAERGASATAKSRAISILQKKPRHQQLLPSLSSFFFSHRLPDMTAIIKEIVSRNKRRYQEDGFDLDLTYIYPNIIAMGFPAERLEGVYRNNIDDVVRFLDSKHKNHYKIYNLCAERHYDTAKFNCRVAQYPFEDHNPPQLELIKPFCEDLDQWLSEDDNHVAAIHCKAGKGRTGVMICAYLLHRGKFLKAQEALDFYGEVRTRDKKGVTIPSQRRYVYYYSYLLKNHLDYRPVALLFHKMMFETIPMFSGGTCNPQFVVCQLKVKIYSSNSGPTRREDKFMYFEFPQPLPVCGDIKVEFFHKQNKMLKKDKMFHFWVNTFFIPGPEETSEKVENGSLCDQEIDSICSIERADNDKEYLVLTLTKNDLDKANKDKANRYFSPNFKVKLYFTKTVEEPSNPEASSSTSVTPDVSDNEPDHYRYSDTTDSDPENEPFDEDQHTQITKVDAHKSEVAHRFKDLGEENFKALVLIAFAQYLQQCPFEDHVKLVNEVTEFAKTCVADESAENCDKSLHTLFGDKLCTVATLRETYGEMADCCAKQEPERNECFLQHKDDNPNLPRLVRPEVDVMCTAFHDNEETFLKKYLYEIARRHPYFYAPELLFFAKRYKAAFTECCQAADKAACLLPKLDELRDEGKASSAKQRLKCASLQKFGERAFKAWAVARLSQRFPKAEFAEVSKLVTDLTKVHTECCHGDLLECADDRADLAKYICENQDSISSKLKECCEKPLLEKSHCIAEVENDEMPADLPSLAADFVESKDVCKNYAEAKDVFLGMFLYEYARRHPDYSVVLLLRLAKTYETTLEKCCAAADPHECYAKVFDEFKPLVEEPQNLIKQNCELFEQLGEYKFQNALLVRYTKKVPQVSTPTLVEVSRNLGKVGSKCCKHPEAKRMPCAEDYLSVVLNQLCVLHEKTPVSDRVTKCCTESLVNRRPCFSALEVDETYVPKEFNAETFTFHADICTLSEKERQIKKQTALVELVKHKPKATKEQLKAVMDDFAAFVEKCCKADDKETCFAEEGKKLVAASQAALGLHHHHHH

SEQ ID NO: 113 - protein, 1166 aa, synthetic construct
MVLQTQVFISLLLWISGAYGSESPVTISRAGNAGELVSPLLLPPTRRRRRRHIQGPGPVLNLPSAAAAPPVARAPEAAGGGSRSEDYSSSPHSAAAAARPLAAEEKQAQSLQPSSSRRSSHYPAAVQSQAAAERGASATAKSRAISILQKKPRHQQLLPSLSSFFFSHRLPDMTAIIKEIVSRNKRRYQEDGFDLDLTYIYPNIIAMGFPAERLEGVYRNNIDDVVRFLDSKHKNHYKIYNLCAERHYDTAKFNCRVAQYPFEDHNPPQLELIKPFCEDLDQWLSEDDNHVAAIHCKAGKGRTGVMICAYLLHRGKFLKAQEALDFYGEVRTRDKKGVTIPSQRRYVYYYSYLLKNHLDYRPVALLFHKMMFETIPMFSGGTCNPQFVVCQLKVKIYSSNSGPTRREDKFMYFEFPQPLPVCGDIKVEFFHKQNKMLKKDKMFHFWVNTFFIPGPEETSEKVENGSLCDQEIDSICSIERADNDKEYLVLTLTKNDLDKANKDKANRYFSPNFKVKLYFTKTVEEPSNPEASSSTSVTPDVSDNEPDHYRYSDTTDSDPENEPFDEDQHTQITKVDAHKSEVAHRFKDLGEENFKALVLIAFAQYLQQCPFEDHVKLVNEVTEFAKTCVADESAENCDKSLHTLFGDKLCTVATLRETYGEMADCCAKQEPERNECFLQHKDDNPNLPRLVRPEVDVMCTAFHDNEETFLKKYLYEIARRHPYFYAPELLFFAKRYKAAFTECCQAADKAACLLPKLDELRDEGKASSAKQRLKCASLQKFGERAFKAWAVARLSQRFPKAEFAEVSKLVTDLTKVHTECCHGDLLECADDRADLAKYICENQDSISSKLKECCEKPLLEKSHCIAEVENDEMPADLPSLAADFVESKDVCKNYAEAKDVFLGMFLYEYARRHPDYSVVLLLRLAKTYETTLEKCCAAADPHECYAKVFDEFKPLVEEPQNLIKQNCELFEQLGEYKFQNALLVRYTKKVPQVSTPTLVEVSRNLGKVGSKCCKHPEAKRMPCAEDYLSVVLNQLCVLHEKTPVSDRVTKCCTESLVNRRPCFSALEVDETYVPKEFNAETFTFHADICTLSEKERQIKKQTALVELVKHKPKATKEQLKAVMDDFAAFVEKCCKADDKETCFAEEGKKLVAASQAALGLHHHHHH

SEQ ID NO: 114 - protein, 1162 aa, synthetic construct
MPLLLLLPLLWAGALASESPVTISRAGNAGELVSPLLLPPTRRRRRRHIQGPGPVLNLPSAAAAPPVARAPEAAGGGSRSEDYSSSPHSAAAAARPLAAEEKQAQSLQPSSSRRSSHYPAAVQSQAAAERGASATAKSRAISILQKKPRHQQLLPSLSSFFFSHRLPDMTAIIKEIVSRNKRRYQEDGFDLDLTYIYPNIIAMGFPAERLEGVYRNNIDDVVRFLDSKHKNHYKIYNLCAERHYDTAKFNCRVAQYPFEDHNPPQLELIKPFCEDLDQWLSEDDNHVAAIHCKAGKGRTGVMICAYLLHRGKFLKAQEALDFYGEVRTRDKKGVTIPSQRRYVYYYSYLLKNHLDYRPVALLFHKMMFETIPMFSGGTCNPQFVVCQLKVKIYSSNSGPTRREDKFMYFEFPQPLPVCGDIKVEFFHKQNKMLKKDKMFHFWVNTFFIPGPEETSEKVENGSLCDQEIDSICSIERADNDKEYLVLTLTKNDLDKANKDKANRYFSPNFKVKLYFTKTVEEPSNPEASSSTSVTPDVSDNEPDHYRYSDTTDSDPENEPFDEDQHTQITKVDAHKSEVAHRFKDLGEENFKALVLIAFAQYLQQCPFEDHVKLVNEVTEFAKTCVADESAENCDKSLHTLFGDKLCTVATLRETYGEMADCCAKQEPERNECFLQHKDDNPNLPRLVRPEVDVMCTAFHDNEETFLKKYLYEIARRHPYFYAPELLFFAKRYKAAFTECCQAADKAACLLPKLDELRDEGKASSAKQRLKCASLQKFGERAFKAWAVARLSQRFPKAEFAEVSKLVTDLTKVHTECCHGDLLECADDRADLAKYICENQDSISSKLKECCEKPLLEKSHCIAEVENDEMPADLPSLAADFVESKDVCKNYAEAKDVFLGMFLYEYARRHPDYSVVLLLRLAKTYETTLEKCCAAADPHECYAKVFDEFKPLVEEPQNLIKQNCELFEQLGEYKFQNALLVRYTKKVPQVSTPTLVEVSRNLGKVGSKCCKHPEAKRMPCAEDYLSVVLNQLCVLHEKTPVSDRVTKCCTESLVNRRPCFSALEVDETYVPKEFNAETFTFHADICTLSEKERQIKKQTALVELVKHKPKATKEQLKAVMDDFAAFVEKCCKADDKETCFAEEGKKLVAASQAALGLHHHHHH

SEQ ID NO: 115 - protein, 1167 aa, synthetic construct
MWWRLWWLLLLLLLLWPMVWASESPVTISRAGNAGELVSPLLLPPTRRRRRRHIQGPGPVLNLPSAAAAPPVARAPEAAGGGSRSEDYSSSPHSAAAAARPLAAEEKQAQSLQPSSSRRSSHYPAAVQSQAAAERGASATAKSRAISILQKKPRHQQLLPSLSSFFFSHRLPDMTAIIKEIVSRNKRRYQEDGFDLDLTYIYPNIIAMGFPAERLEGVYRNNIDDVVRFLDSKHKNHYKIYNLCAERHYDTAKFNCRVAQYPFEDHNPPQLELIKPFCEDLDQWLSEDDNHVAAIHCKAGKGRTGVMICAYLLHRGKFLKAQEALDFYGEVRTRDKKGVTIPSQRRYVYYYSYLLKNHLDYRPVALLFHKMMFETIPMFSGGTCNPQFVVCQLKVKIYSSNSGPTRREDKFMYFEFPQPLPVCGDIKVEFFHKQNKMLKKDKMFHFWVNTFFIPGPEETSEKVENGSLCDQEIDSICSIERADNDKEYLVLTLTKNDLDKANKDKANRYFSPNFKVKLYFTKTVEEPSNPEASSSTSVTPDVSDNEPDHYRYSDTTDSDPENEPFDEDQHTQITKVDAHKSEVAHRFKDLGEENFKALVLIAFAQYLQQCPFEDHVKLVNEVTEFAKTCVADESAENCDKSLHTLFGDKLCTVATLRETYGEMADCCAKQEPERNECFLQHKDDNPNLPRLVRPEVDVMCTAFHDNEETFLKKYLYEIARRHPYFYAPELLFFAKRYKAAFTECCQAADKAACLLPKLDELRDEGKASSAKQRLKCASLQKFGERAFKAWAVARLSQRFPKAEFAEVSKLVTDLTKVHTECCHGDLLECADDRADLAKYICENQDSISSKLKECCEKPLLEKSHCIAEVENDEMPADLPSLAADFVESKDVCKNYAEAKDVFLGMFLYEYARRHPDYSVVLLLRLAKTYETTLEKCCAAADPHECYAKVFDEFKPLVEEPQNLIKQNCELFEQLGEYKFQNALLVRYTKKVPQVSTPTLVEVSRNLGKVGSKCCKHPEAKRMPCAEDYLSVVLNQLCVLHEKTPVSDRVTKCCTESLVNRRPCFSALEVDETYVPKEFNAETFTFHADICTLSEKERQIKKQTALVELVKHKPKATKEQLKAVMDDFAAFVEKCCKADDKETCFAEEGKKLVAASQAALGLHHHHHH

SEQ ID NO: 116 - protein, 1169 aa, synthetic construct
MWWRLWWLLLLLLLLWPMVWAAASESPVTISRAGNAGELVSPLLLPPTRRRRRRHIQGPGPVLNLPSAAAAPPVARAPEAAGGGSRSEDYSSSPHSAAAAARPLAAEEKQAQSLQPSSSRRSSHYPAAVQSQAAAERGASATAKSRAISILQKKPRHQQLLPSLSSFFFSHRLPDMTAIIKEIVSRNKRRYQEDGFDLDLTYIYPNIIAMGFPAERLEGVYRNNIDDVVRFLDSKHKNHYKIYNLCAERHYDTAKFNCRVAQYPFEDHNPPQLELIKPFCEDLDQWLSEDDNHVAAIHCKAGKGRTGVMICAYLLHRGKFLKAQEALDFYGEVRTRDKKGVTIPSQRRYVYYYSYLLKNHLDYRPVALLFHKMMFETIPMFSGGTCNPQFVVCQLKVKIYSSNSGPTRREDKFMYFEFPQPLPVCGDIKVEFFHKQNKMLKKDKMFHFWVNTFFIPGPEETSEKVENGSLCDQEIDSICSIERADNDKEYLVLTLTKNDLDKANKDKANRYFSPNFKVKLYFTKTVEEPSNPEASSSTSVTPDVSDNEPDHYRYSDTTDSDPENEPFDEDQHTQITKVDAHKSEVAHRFKDLGEENFKALVLIAFAQYLQQCPFEDHVKLVNEVTEFAKTCVADESAENCDKSLHTLFGDKLCTVATLRETYGEMADCCAKQEPERNECFLQHKDDNPNLPRLVRPEVDVMCTAFHDNEETFLKKYLYEIARRHPYFYAPELLFFAKRYKAAFTECCQAADKAACLLPKLDELRDEGKASSAKQRLKCASLQKFGERAFKAWAVARLSQRFPKAEFAEVSKLVTDLTKVHTECCHGDLLECADDRADLAKYICENQDSISSKLKECCEKPLLEKSHCIAEVENDEMPADLPSLAADFVESKDVCKNYAEAKDVFLGMFLYEYARRHPDYSVVLLLRLAKTYETTLEKCCAAADPHECYAKVFDEFKPLVEEPQNLIKQNCELFEQLGEYKFQNALLVRYTKKVPQVSTPTLVEVSRNLGKVGSKCCKHPEAKRMPCAEDYLSVVLNQLCVLHEKTPVSDRVTKCCTESLVNRRPCFSALEVDETYVPKEFNAETFTFHADICTLSEKERQIKKQTALVELVKHKPKATKEQLKAVMDDFAAFVEKCCKADDKETCFAEEGKKLVAASQAALGLHHHHHH

SEQ ID NO: 117 - protein, 1169 aa, synthetic construct
MKWVTFLLLLFVSGSAFSRGVFRRSESPVTIARAGNAGELLSPLLLPPTRRRRRRHVQGPGPVLSLPSAAAAPPLARAPEAAGGGSRCEDYPSSPHSAASAARPLAAEEKQAQSLQPSSSRRSSHYPAAVQGQAAAERGASATAKSRAISILQKKPRHQQLLPSLSSFFFSHRLPDMTAIIKEIVSRNKRRYQEDGFDLDLTYIYPNIIAMGFPAERLEGVYRNNIDDVVRFLDSKHKNHYKIYNLCAERHYDTAKFNCRVAQYPFEDHNPPQLELIKPFCEDLDQWLSEDDNHVAAIHCKAGKGRTGVMICAYLLHRGKFLKAQEALDFYGEVRTRDKKGVTIPSQRRYVYYYSYLLKNHLDYRPVALLFHKMMFETIPMFSGGTCNPQFVVCQLKVKIYSSNSGPTRREDKFMYFEFPQPLPVCGDIKVEFFHKQNKMLKKDKMFHFWVNTFFIPGPEETSEKVENGSLCDQEIDSICSIERADNDKEYLVLTLTKNDLDKANKDKANRYFSPNFKVKLYFTKTVEEPSNPEASSSTSVTPDVSDNEPDHYRYSDTTDSDPENEPFDEDQHSQITKVEAHKSEIAHRFKDLGEQHFKGLVLIAFSQYLQKCPYEEHIKLVQEVTDFAKTCVADENAENCDKSIHTLFGDKLCAIPKLRDNYGELADCCAKQEPERNECFLQHKDDNPNLPPFQRPEAEAMCTSFQENPTSFLGHYLHEVARRHPYFYAPELLYYAEKYNEVLTQCCTESDKAACLTPKLDAVKEKALVAAVRQRMKCSSMQRFGERAFKAWAVARMSQRFPNAEFAEITKLATDVTKINKECCHGDLLECADDRAELAKYMCENQATISSKLQACCDKPVLQKSQCLAEIEHDNIPADLPSIAADFVEDKEVCKNYAEAKDVFLGTFLYEYSRRHPDYSVSLLLRLAKKYEATLEKCCAEGDPPACYGTVLAEFQPLVEEPKNLVKTNCELYEKLGEYGFQNAVLVRYTQKAPQVSTPTLVEAARNLGRVGTKCCTLPEAQRLPCVEDYLSAILNRLCVLHEKTPVSEKVTKCCSGSLVERRPCFSALTVDETYVPKEFKAETFTFHSDICTLPDKEKQIKKQTALAELVKHKPKATEDQLKTVMGDFAQFVDKCCKAADKDNCFATEGPNLVARSKEALAHHHHHH

SEQ ID NO: 118 - protein, 1179 aa, synthetic construct
MKWVTFISLLFLFSSAYSRGVFRRYPYDVPDYASESPVTISRAGNAGELVSPLLLPPTRRRRRRHIQGPGPVLNLPSAAAAPPVARAPEAAGGGSRSEDYSSSPHSAAAAARPLAAEEKQAQSLQPSSSRRSSHYPAAVQSQAAAERGASATAKSRAISILQKKPRHQQLLPSLSSFFFSHRLPDMTAIIKEIVSRNKRRYQEDGFDLDLTYIYPNIIAMGFPAERLEGVYRNNIDDVVRFLDSKHKNHYKIYNLCAERHYDTAKFNCRVAQYPFEDHNPPQLELIKPFCEDLDQWLSEDDNHVAAIHCKAGKGRTGVMICAYLLHRGKFLKAQEALDFYGEVRTRDKKGVTIPSQRRYVYYYSYLLKNHLDYRPVALLFHKMMFETIPMFSGGTCNPQFVVCQLKVKIYSSNSGPTRREDKFMYFEFPQPLPVCGDIKVEFFHKQNKMLKKDKMFHFWVNTFFIPGPEETSEKVENGSLCDQEIDSICSIERADNDKEYLVLTLTKNDLDKANKDKANRYFSPNFKVKLYFTKTVEEPSNPEASSSTSVTPDVSDNEPDHYRYSDTTDSDPENEPFDEDQHTQITKVDAHKSEVAHRFKDLGEENFKALVLIAFAQYLQQCPFEDHVKLVNEVTEFAKTCVADESAENCDKSLHTLFGDKLCTVATLRETYGEMADCCAKQEPERNECFLQHKDDNPNLPRLVRPEVDVMCTAFHDNEETFLKKYLYEIARRHPYFYAPELLFFAKRYKAAFTECCQAADKAACLLPKLDELRDEGKASSAKQRLKCASLQKFGERAFKAWAVARLSQRFPKAEFAEVSKLVTDLTKVHTECCHGDLLECADDRADLAKYICENQDSISSKLKECCEKPLLEKSHCIAEVENDEMPADLPSLAADFVESKDVCKNYAEAKDVFLGMFLYEYARRHPDYSVVLLLRLAKTYETTLEKCCAAADPHECYAKVFDEFKPLVEEPQNLIKQNCELFEQLGEYKFQNALLVRYTKKVPQVSTPTLVEVSRNLGKVGSKCCKHPEAKRMPCAEDYLSVVLNQLCVLHEKTPVSDRVTKCCTESLVNRRPCFSALEVDETYVPKEFNAETFTFHADICTLSEKERQIKKQTALVELVKHKPKATKEQLKAVMDDFAAFVEKCCKADDKETCFAEEGKKLVAASQAALGLHHHHHH

SEQ ID NO: 119 - protein, 1164 aa, synthetic construct
MKWVTFISLLFLFSSAYSRGVFRRSESPVTISRAGNAGELVSPLLLPPTRRRRRRHIQGPGPVLNLPSAAAAPPVARAPEAAGGGSRSEDYSSSPHSAAAAARPLAAEEKQAQSLQPSSSRRSSHYPAAVQSQAAAERGASATAKSRAISILQKKPRHQQLLPSLSSFFFSHRLPDMTAIIKEIVSRNKRRYQEDGFDLDLTYIYPNIIAMGFPAERLEGVYRNNIDDVVRFLDSKHKNHYKIYNLCAERHYDTAKFNCRVAQYPFEDHNPPQLELIKPFCEDLDQWLSEDDNHVAAIHCKAGKGRTGVMICAYLLHRGKFLKAQEALDFYGEVRTRDKKGVTIPSQRRYVYYYSYLLKNHLDYRPVALLFHKMMFETIPMFSGGTCNPQFVVCQLKVKIYSSNSGPTRREDKFMYFEFPQPLPVCGDIKVEFFHKQNKMLKKDKMFHFWVNTFFIPGPEETSEKVENGSLCDQEIDSICSIERADNDKEYLVLTLTKNDLDKANKDKANRYFSPNFKVKLYFTKTVEEPSNPEASSSTSVTPDVSDNEPDHYRYSDTTDSDPENEPFDEDQHTQITKVDAHKSEVAHRFKDLGEENFKALVLIAFAQYLQQSPFEDHVKLVNEVTEFAKTCVADESAENCDKSLHTLFGDKLCTVATLRETYGEMADCCAKQEPERNECFLQHKDDNPNLPRLVRPEVDVMCTAFHDNEETFLKKYLYEIARRHPYFYAPELLFFAKRYKAAFTECCQAADKAACLLPKLDELRDEGKASSAKQRLKCASLQKFGERAFKAWAVARLSQRFPKAEFAEVSKLVTDLTKVHTECCHGDLLECADDRADLAKYICENQDSISSKLKECCEKPLLEKSHCIAEVENDEMPADLPSLAADFVESKDVCKNYAEAKDVFLGMFLYEYARRHPDYSVVLLLRLAKTYETTLEKCCAAADPHECYAKVFDEFKPLVEEPQNLIKQNCELFEQLGEYKFQNALLVRYTKKVPQVSTPTLVEVSRNLGKVGSKCCKHPEAKRMPCAEDYLSVVLNQLCVLHEKTPVSDRVTKCCTESLVNRRPCFSALEVDETYVPKEFNAETFTFHADICTLSEKERQIKKQTALVELVKHKPKATKEQLKAVMDDFAAFVEKCCKADDKETCFAEEGKKLVAASQAALGL

SEQ ID NO: 120 - protein, 1158 aa, synthetic construct
MKWVTFISLLFLFSSAYSRGVFRRISRAGNAGELVSPLLLPPTRRRRRRHIQGPGPVLNLPSAAAAPPVARAPEAAGGGSRSEDYSSSPHSAAAAARPLAAEEKQAQSLQPSSSRRSSHYPAAVQSQAAAERGASATAKSRAISILQKKPRHQQLLPSLSSFFFSHRLPDMTAIIKEIVSRNKRRYQEDGFDLDLTYIYPNIIAMGFPAERLEGVYRNNIDDVVRFLDSKHKNHYKIYNLCAERHYDTAKFNCRVAQYPFEDHNPPQLELIKPFCEDLDQWLSEDDNHVAAIHCKAGKGRTGVMICAYLLHRGKFLKAQEALDFYGEVRTRDKKGVTIPSQRRYVYYYSYLLKNHLDYRPVALLFHKMMFETIPMFSGGTCNPQFVVCQLKVKIYSSNSGPTRREDKFMYFEFPQPLPVCGDIKVEFFHKQNKMLKKDKMFHFWVNTFFIPGPEETSEKVENGSLCDQEIDSICSIERADNDKEYLVLTLTKNDLDKANKDKANRYFSPNFKVKLYFTKTVEEPSNPEASSSTSVTPDVSDNEPDHYRYSDTTDSDPENEPFDEDQHTQITKVDAHKSEVAHRFKDLGEENFKALVLIAFAQYLQQSPFEDHVKLVNEVTEFAKTCVADESAENCDKSLHTLFGDKLCTVATLRETYGEMADCCAKQEPERNECFLQHKDDNPNLPRLVRPEVDVMCTAFHDNEETFLKKYLYEIARRHPYFYAPELLFFAKRYKAAFTECCQAADKAACLLPKLDELRDEGKASSAKQRLKCASLQKFGERAFKAWAVARLSQRFPKAEFAEVSKLVTDLTKVHTECCHGDLLECADDRADLAKYICENQDSISSKLKECCEKPLLEKSHCIAEVENDEMPADLPSLAADFVESKDVCKNYAEAKDVFLGMFLYEYARRHPDYSVVLLLRLAKTYETTLEKCCAAADPHECYAKVFDEFKPLVEEPQNLIKQNCELFEQLGEYKFQNALLVRYTKKVPQVSTPTLVEVSRNLGKVGSKCCKHPEAKRMPCAEDYLSVVLNQLCVLHEKTPVSDRVTKCCTESLVNRRPCFSALEVDETYVPKEFNAETFTFHADICTLSEKERQIKKQTALVELVKHKPKATKEQLKAVMDDFAAFVEKCCKADDKETCFAEEGKKLVAASQAALGL

SEQ ID NO: 121 - protein, 970 aa, synthetic construct
MKWVTFISLLFLFSSAYSRGVFRRSESPVTISRAGNAGELVSPLLLPPTRRRRRRHIQGPGPVLNLPSAAAAPPVARAPEAAGGGSRSEDYSSSPHSAAAAARPLAAEEKQAQSLQPSSSRRSSHYPAAVQSQAAAERGASATAKSRAISILQKKPRHQQLLPSLSSFFFSHRLPDMTAIIKEIVSRNKRRYQEDGFDLDLTYIYPNIIAMGFPAERLEGVYRNNIDDVVRFLDSKHKNHYKIYNLCAERHYDTAKFNCRVAQYPFEDHNPPQLELIKPFCEDLDQWLSEDDNHVAAIHCKAGKGRTGVMICAYLLHRGKFLKAQEALDFYGEVRTRDKKGVTIPSQRRYVYYYSYLLKNHLDYRPVALLFHKMMFETIPMFSGGTCNPQFVVCQLKVKIYSSNSGPTRREDKFMYFEFPQPLPVCGDIKVEFFHKQNKMLKKDKMFHFWVNTFFIPGPEETSEKVENGSLCDQEIDSICSIERADNDKEYLVLTLTKNDLDKANKDKANRYFSPNFKVKLYFTKTVEEPSNPEASSSTSVTPDVSDNEPDHYRYSDTTDSDPENEPFDEDQHTQITKVDAHKSEVAHRFKDLGEENFKALVLIAFAQYLQQCPFEDHVKLVNEVTEFAKTCVADESAENCDKSLHTLFGDKLCTVATLRETYGEMADCCAKQEPERNECFLQHKDDNPNLPRLVRPEVDVMCTAFHDNEETFLKKYLYEIARRHPYFYAPELLFFAKRYKAAFTECCQAADKAACLLPKLDELRDEGKASSAKQRLKCASLQKFGERAFKAWAVARLSQRFPKAEFAEVSKLVTDLTKVHTECCHGDLLECADDRADLAKYICENQDSISSKLKECCEKPLLEKSHCIAEVENDEMPADLPSLAADFVESKDVCKNYAEAKDVFLGMFLYEYARRHPDYSVVLLLRLAKTYETTLEKCCAAADPHECYAKVFDEFKPLVEEPQHHHHHH

SEQ ID NO: 122 - protein, 782 aa, synthetic construct
MKWVTFISLLFLFSSAYSRGVFRRSESPVTISRAGNAGELVSPLLLPPTRRRRRRHIQGPGPVLNLPSAAAAPPVARAPEAAGGGSRSEDYSSSPHSAAAAARPLAAEEKQAQSLQPSSSRRSSHYPAAVQSQAAAERGASATAKSRAISILQKKPRHQQLLPSLSSFFFSHRLPDMTAIIKEIVSRNKRRYQEDGFDLDLTYIYPNIIAMGFPAERLEGVYRNNIDDVVRFLDSKHKNHYKIYNLCAERHYDTAKFNCRVAQYPFEDHNPPQLELIKPFCEDLDQWLSEDDNHVAAIHCKAGKGRTGVMICAYLLHRGKFLKAQEALDFYGEVRTRDKKGVTIPSQRRYVYYYSYLLKNHLDYRPVALLFHKMMFETIPMFSGGTCNPQFVVCQLKVKIYSSNSGPTRREDKFMYFEFPQPLPVCGDIKVEFFHKQNKMLKKDKMFHFWVNTFFIPGPEETSEKVENGSLCDQEIDSICSIERADNDKEYLVLTLTKNDLDKANKDKANRYFSPNFKVKLYFTKTVEEPSNPEASSSTSVTPDVSDNEPDHYRYSDTTDSDPENEPFDEDQHTQITKVDAHKSEVAHRFKDLGEENFKALVLIAFAQYLQQCPFEDHVKLVNEVTEFAKTCVADESAENCDKSLHTLFGDKLCTVATLRETYGEMADCCAKQEPERNECFLQHKDDNPNLPRLVRPEVDVMCTAFHDNEETFLKKYLYEIARRHPYFYAPELLFFAKRYKAAFTECCQAADKAACLLPKLDELRDEGKASSAKQRHHHHHH

SEQ ID NO: 123 - protein, 1136 aa, synthetic construct
MKWVTFISLLFLFSSAYSRGVFRRSESPVTISRAGNAGELVSPLLLPPTRRRRRRHIQGPGPVLNLPSAAAAPPVARAPEAAGGGSRSEDYSSSPHSAAAAARPLAAEEKQAQSLQPSSSRRSSHYPAAVQSQAAAERGASATAKSRAISILQKKPRHQQLLPSLSSFFFSHRLPDMTAIIKEIVSRNKRRYQEDGFDLDLTYIYPNIIAMGFPAERLEGVYRNNIDDVVRFLDSKHKNHYKIYNLCAERHYDTAKFNCRVAQYPFEDHNPPQLELIKPFCEDLDQWLSEDDNHVAAIHCKAGKGRTGVMICAYLLHRGKFLKAQEALDFYGEVRTRDKKGVTIPSQRRYVYYYSYLLKNHLDYRPVALLFHKMMFETIPMFSGGTCNPQFVVCQLKVKIYSSNSGPTRREDKFMYFEFPQPLPVCGDIKVEFFHKQNKMLKKDKMFHFWVNTFFIPGPEETSEKVENGSLCDQEIDSICSIERADNDKEYLVLTLTKNDLDKANKDKANRYFSPNFKVKLYFTKTVEEPSNPEASSSTSVTPDVSDNEPDHYRYSDTTDSDPENEPFDEDQHTQITKVPFEDHVKLVNEVTEFAKTCVADESAENCDKSLHTLFGDKLCTVATLRETYGEMADCCAKQEPERNECFLQHKDDNPNLPRLVRPEVDVMCTAFHDNEETFLKKYLYEIARRHPYFYAPELLFFAKRYKAAFTECCQAADKAACLLPKLDELRDEGKASSAKQRLKCASLQKFGERAFKAWAVARLSQRFPKAEFAEVSKLVTDLTKVHTECCHGDLLECADDRADLAKYICENQDSISSKLKECCEKPLLEKSHCIAEVENDEMPADLPSLAADFVESKDVCKNYAEAKDVFLGMFLYEYARRHPDYSVVLLLRLAKTYETTLEKCCAAADPHECYAKVFDEFKPLVEEPQNLIKQNCELFEQLGEYKFQNALLVRYTKKVPQVSTPTLVEVSRNLGKVGSKCCKHPEAKRMPCAEDYLSVVLNQLCVLHEKTPVSDRVTKCCTESLVNRRPCFSALEVDETYVPKEFNAETFTFHADICTLSEKERQIKKQTALVELVKHKPKATKEQLKAVMDDFAAFVEKCCKADDKETCFAEEGKKLVAASQAALGLHHHHHH

SEQ ID NO: 124 - protein, 1108 aa, synthetic construct
MKWVTFISLLFLFSSAYSRGVFRRSESPVTISRAGNAGELVSPLLLPPTRRRRRRHIQGPGPVLNLPSAAAAPPVARAPEAAGGGSRSEDYSSSPHSAAAAARPLAAEEKQAQSLQPSSSRRSSHYPAAVQSQAAAERGASATAKSRAISILQKKPRHQQLLPSLSSFFFSHRLPDMTAIIKEIVSRNKRRYQEDGFDLDLTYIYPNIIAMGFPAERLEGVYRNNIDDVVRFLDSKHKNHYKIYNLCAERHYDTAKFNCRVAQYPFEDHNPPQLELIKPFCEDLDQWLSEDDNHVAAIHCKAGKGRTGVMICAYLLHRGKFLKAQEALDFYGEVRTRDKKGVTIPSQRRYVYYYSYLLKNHLDYRPVALLFHKMMFETIPMFSGGTCNPQFVVCQLKVKIYSSNSGPTRREDKFMYFEFPQPLPVCGDIKVEFFHKQNKMLKKDKMFHFWVNTFFIPGPEETSEKVENGSLCDQEIDSICSIERADNDKEYLVLTLTKNDLDKANKDKANRYFSPNFKVKLYFTKTVEEPSNPEASSSTSVTPDVSDNEPDHYRYSDTTDSDPENEPFDEDQHTQITKVDKSLHTLFGDKLCTVATLRETYGEMADCCAKQEPERNECFLQHKDDNPNLPRLVRPEVDVMCTAFHDNEETFLKKYLYEIARRHPYFYAPELLFFAKRYKAAFTECCQAADKAACLLPKLDELRDEGKASSAKQRLKCASLQKFGERAFKAWAVARLSQRFPKAEFAEVSKLVTDLTKVHTECCHGDLLECADDRADLAKYICENQDSISSKLKECCEKPLLEKSHCIAEVENDEMPADLPSLAADFVESKDVCKNYAEAKDVFLGMFLYEYARRHPDYSVVLLLRLAKTYETTLEKCCAAADPHECYAKVFDEFKPLVEEPQNLIKQNCELFEQLGEYKFQNALLVRYTKKVPQVSTPTLVEVSRNLGKVGSKCCKHPEAKRMPCAEDYLSVVLNQLCVLHEKTPVSDRVTKCCTESLVNRRPCFSALEVDETYVPKEFNAETFTFHADICTLSEKERQIKKQTALVELVKHKPKATKEQLKAVMDDFAAFVEKCCKADDKETCFAEEGKKLVAASQAALGLHHHHHH

SEQ ID NO: 125 - protein, 1017 aa, synthetic construct
MKWVTFISLLFLFSSAYSRGVFRRTAIIKEIVSRNKRRYQEDGFDLDLTYIYPNIIAMGFPAERLEGVYRNNIDDVVRFLDSKHKNHYKIYNLCAERHYDTAKFNCRVAQYPFEDHNPPQLELIKPFCEDLDQWLSEDDNHVAAIHCKAGKGRTGVMICAYLLHRGKFLKAQEALDFYGEVRTRDKKGVTIPSQRRYVYYYSYLLKNHLDYRPVALLFHKMMFETIPMFSGGTCNPQFVVCQLKVKIYSSNSGPTRREDKFMYFEFPQPLPVCGDIKVEFFHKQNKMLKKDKMFHFWVNTFFIPGPEETSEKVENGSLCDQEIDSICSIERADNDKEYLVLTLTKNDLDKANKDKANRYFSPNFKVKLYFTKTVEEPSNPEASSSTSVTPDVSDNEPDHYRYSDTTDSDPENEPFDEDQHTQITKVDAHKSEVAHRFKDLGEENFKALVLIAFAQYLQQCPFEDHVKLVNEVTEFAKTCVADESAENCDKSLHTLFGDKLCTVATLRETYGEMADCCAKQEPERNECFLQHKDDNPNLPRLVRPEVDVMCTAFHDNEETFLKKYLYEIARRHPYFYAPELLFFAKRYKAAFTECCQAADKAACLLPKLDELRDEGKASSAKQRLKCASLQKFGERAFKAWAVARLSQRFPKAEFAEVSKLVTDLTKVHTECCHGDLLECADDRADLAKYICENQDSISSKLKECCEKPLLEKSHCIAEVENDEMPADLPSLAADFVESKDVCKNYAEAKDVFLGMFLYEYARRHPDYSVVLLLRLAKTYETTLEKCCAAADPHECYAKVFDEFKPLVEEPQNLIKQNCELFEQLGEYKFQNALLVRYTKKVPQVSTPTLVEVSRNLGKVGSKCCKHPEAKRMPCAEDYLSVVLNQLCVLHEKTPVSDRVTKCCTESLVNRRPCFSALEVDETYVPKEFNAETFTFHADICTLSEKERQIKKQTALVELVKHKPKATKEQLKAVMDDFAAFVEKCCKADDKETCFAEEGKKLVAASQAALGLHHHHHH

SEQ ID NO: 126 - protein, 1016 aa, synthetic construct
MKWVTFLLLLFVSGSAFSRGVFRREAHKSEIAHRFKDLGEQHFKGLVLIAFSQYLQKCPYEEHIKLVQEVTDFAKTCVADENAENCDKSIHTLFGDKLCAIPKLRDNYGELADCCAKQEPERNECFLQHKDDNPNLPPFQRPEAEAMCTSFQENPTSFLGHYLHEVARRHPYFYAPELLYYAEKYNEVLTQCCTESDKAACLTPKLDAVKEKALVAAVRQRMKCSSMQRFGERAFKAWAVARMSQRFPNAEFAEITKLATDVTKINKECCHGDLLECADDRAELAKYMCENQATISSKLQACCDKPVLQKSQCLAEIEHDNIPADLPSIAADFVEDKEVCKNYAEAKDVFLGTFLYEYSRRHPDYSVSLLLRLAKKYEATLEKCCAEGDPPACYGTVLAEFQPLVEEPKNLVKTNCELYEKLGEYGFQNAVLVRYTQKAPQVSTPTLVEAARNLGRVGTKCCTLPEAQRLPCVEDYLSAILNRLCVLHEKTPVSEKVTKCCSGSLVERRPCFSALTVDETYVPKEFKAETFTFHSDICTLPDKEKQIKKQTALAELVKHKPKATEDQLKTVMGDFAQFVDKCCKAADKDNCFATEGPNLVARSKEALATAIIKEIVSRNKRRYQEDGFDLDLTYIYPNIIAMGFPAERLEGVYRNNIDDVVRFLDSKHKNHYKIYNLCAERHYDTAKFNCRVAQYPFEDHNPPQLELIKPFCEDLDQWLSEDDNHVAAIHCKAGKGRTGVMICAYLLHRGKFLKAQEALDFYGEVRTRDKKGVTIPSQRRYVYYYSYLLKNHLDYRPVALLFHKMMFETIPMFSGGTCNPQFVVCQLKVKIYSSNSGPTRREDKFMYFEFPQPLPVCGDIKVEFFHKQNKMLKKDKMFHFWVNTFFIPGPEETSEKVENGSLCDQEIDSICSIERADNDKEYLVLTLTKNDLDKANKDKANRYFSPNFKVKLYFTKTVEEPSNPEASSSTSVTPDVSDNEPDHYRYSDTTDSDPENEPFDEDQHSQITKVHHHHHH

SEQ ID NO: 127 - protein, 813 aa, synthetic construct
MKWVTFLLLLFVSGSAFSRGVFRREAHKSEIAHRFKDLGEQHFKGLVLIAFSQYLQKCPYEEHIKLVQEVTDFAKTCVADENAENCDKSIHTLFGDKLCAIPKLRDNYGELADCCAKQEPERNECFLQHKDDNPNLPPFQRPEAEAMCTSFQENPTSFLGHYLHEVARRHPYFYAPELLYYAEKYNEVLTQCCTESDKAACLTPKLDAVKEKALVAAVRQRMKCSSMQRFGERAFKAWAVARMSQRFPNAEFAEITKLATDVTKINKECCHGDLLECADDRAELAKYMCENQATISSKLQACCDKPVLQKSQCLAEIEHDNIPADLPSIAADFVEDKEVCKNYAEAKDVFLGTFLYEYSRRHPDYSVSLLLRLAKKYEATLEKCCAEGDPPACYGTVLAEFQPLVTAIIKEIVSRNKRRYQEDGFDLDLTYIYPNIIAMGFPAERLEGVYRNNIDDVVRFLDSKHKNHYKIYNLCAERHYDTAKFNCRVAQYPFEDHNPPQLELIKPFCEDLDQWLSEDDNHVAAIHCKAGKGRTGVMICAYLLHRGKFLKAQEALDFYGEVRTRDKKGVTIPSQRRYVYYYSYLLKNHLDYRPVALLFHKMMFETIPMFSGGTCNPQFVVCQLKVKIYSSNSGPTRREDKFMYFEFPQPLPVCGDIKVEFFHKQNKMLKKDKMFHFWVNTFFIPGPEETSEKVENGSLCDQEIDSICSIERADNDKEYLVLTLTKNDLDKANKDKANRYFSPNFKVKLYFTKTVEEPSNPEASSSTSVTPDVSDNEPDHYRYSDTTDSDPENEPFDEDQHSQITKVHHHHHH

SEQ ID NO: 128 - protein, 1016 aa, synthetic construct
MKWVTFLLLLFVSGSAFSRGVFRREAHKSEIAHRYNDLGEQHFKGLVLIAFSQYLQKCSYDEHAKLVQEVTDFAKTCVADESAANCDKSLHTLFGDKLCAIPNLRENYGELADCCTKQEPERNECFLQHKDDNPSLPPFERPEAEAMCTSFKENPTTFMGHYLHEVARRHPYFYAPELLYYAEQYNEILTQCCAEADKESCLTPKLDGVKEKALVSSVRQRMKCSSMQKFGERAFKAWAVARLSQTFPNADFAEITKLATDLTKVNKECCHGDLLECADDRAELAKYMCENQATISSKLQTCCDKPLLKKAHCLSEVEHDTMPADLPAIAADFVEDQEVCKNYAEAKDVFLGTFLYEYSRRHPDYSVSLLLRLAKKYEATLEKCCAEANPPACYGTVLAEFQPLVEEPKNLVKTNCDLYEKLGEYGFQNAILVRYTQKAPQVSTPTLVEAARNLGRVGTKCCTLPEDQRLPCVEDYLSAILNRVCLLHEKTPVSEHVTKCCSGSLVERRPCFSALTVDETYVPKEFKAETFTFHSDICTLPEKEKQIKKQTALAELVKHKPKATAEQLKTVMDDFAQFLDTCCKAADKDTCFSTEGPNLVTRCKDALATAIIKEIVSRNKRRYQEDGFDLDLTYIYPNIIAMGFPAERLEGVYRNNIDDVVRFLDSKHKNHYKIYNLCAERHYDTAKFNCRVAQYPFEDHNPPQLELIKPFCEDLDQWLSEDDNHVAAIHCKAGKGRTGVMICAYLLHRGKFLKAQEALDFYGEVRTRDKKGVTIPSQRRYVYYYSYLLKNHLDYRPVALLFHKMMFETIPMFSGGTCNPQFVVCQLKVKIYSSNSGPTRREDKFMYFEFPQPLPVCGDIKVEFFHKQNKMLKKDKMFHFWVNTFFIPGPEETSEKVENGSLCDQEIDSICSIERADNDKEYLVLTLTKNDLDKANKDKANRYFSPNFKVKLYFTKTVEEPSNPEASSSTSVTPDVSDNEPDHYRYSDTTDSDPENEPFDEDQHSQITKVHHHHHH

SEQ ID NO: 129 - protein, 1178 aa, synthetic construct
MKWVTFISLLFLFSSAYSRGVFRRSESPVTISRAGNAGELVSPLLLPPTRRRRRRHIQGPGPVLNLPSAAAAPPVARAPEAAGGGSRSEDYSSSPHSAAAAARPLAAEEKQAQSLQPSSSRRSSHYPAAVQSQAAAERGASATAKSRAISILQKKPRHQQLLPSLSSFFFSHRLPDMTAIIKEIVSRNKRRYQEDGFDLDLTYIYPNIIAMGFPAERLEGVYRNNIDDVVRFLDSKHKNHYKIYNLCAERHYDTAKFNCRVAQYPFEDHNPPQLELIKPFCEDLDQWLSEDDNHVAAIHCKAGKGRTGVMICAYLLHRGKFLKAQEALDFYGEVRTRDKKGVTIPSQRRYVYYYSYLLKNHLDYRPVALLFHKMMFETIPMFSGGTCNPQFVVCQLKVKIYSSNSGPTRREDKFMYFEFPQPLPVCGDIKVEFFHKQNKMLKKDKMFHFWVNTFFIPGPEETSEKVENGSLCDQEIDSICSIERADNDKEYLVLTLTKNDLDKANKDKANRYFSPNFKVKLYFTKTVEEPSNPEASSSTSVTPDVSDNEPDHYRYSDTTDSDPENEPFDEDQHTQITKVGPAALKAADAHKSEVAHRFKDLGEENFKALVLIAFAQYLQQCPFEDHVKLVNEVTEFAKTCVADESAENCDKSLHTLFGDKLCTVATLRETYGEMADCCAKQEPERNECFLQHKDDNPNLPRLVRPEVDVMCTAFHDNEETFLKKYLYEIARRHPYFYAPELLFFAKRYKAAFTECCQAADKAACLLPKLDELRDEGKASSAKQRLKCASLQKFGERAFKAWAVARLSQRFPKAEFAEVSKLVTDLTKVHTECCHGDLLECADDRADLAKYICENQDSISSKLKECCEKPLLEKSHCIAEVENDEMPADLPSLAADFVESKDVCKNYAEAKDVFLGMFLYEYARRHPDYSVVLLLRLAKTYETTLEKCCAAADPHECYAKVFDEFKPLVEEPQNLIKQNCELFEQLGEYKFQNALLVRYTKKVPQVSTPTLVEVSRNLGKVGSKCCKHPEAKRMPCAEDYLSVVLNQLCVLHEKTPVSDRVTKCCTESLVNRRPCFSALEVDETYVPKEFNAETFTFHADICTLSEKERQIKKQTALVELVKHKPKATKEQLKAVMDDFAAFVEKCCKADDKETCFAEEGKKLVAASQAALGLHHHHHH

SEQ ID NO: 130 - protein, 1175 aa, synthetic construct
MKWVTFISLLFLFSSAYSRGVFRRSESPVTISRAGNAGELVSPLLLPPTRRRRRRHIQGPGPVLNLPSAAAAPPVARAPEAAGGGSRSEDYSSSPHSAAAAARPLAAEEKQAQSLQPSSSRRSSHYPAAVQSQAAAERGASATAKSRAISILQKKPRHQQLLPSLSSFFFSHRLPDMTAIIKEIVSRNKRRYQEDGFDLDLTYIYPNIIAMGFPAERLEGVYRNNIDDVVRFLDSKHKNHYKIYNLCAERHYDTAKFNCRVAQYPFEDHNPPQLELIKPFCEDLDQWLSEDDNHVAAIHCKAGKGRTGVMICAYLLHRGKFLKAQEALDFYGEVRTRDKKGVTIPSQRRYVYYYSYLLKNHLDYRPVALLFHKMMFETIPMFSGGTCNPQFVVCQLKVKIYSSNSGPTRREDKFMYFEFPQPLPVCGDIKVEFFHKQNKMLKKDKMFHFWVNTFFIPGPEETSEKVENGSLCDQEIDSICSIERADNDKEYLVLTLTKNDLDKANKDKANRYFSPNFKVKLYFTKTVEEPSNPEASSSTSVTPDVSDNEPDHYRYSDTTDSDPENEPFDEDQHTQITKVGGAGSDAHKSEVAHRFKDLGEENFKALVLIAFAQYLQQCPFEDHVKLVNEVTEFAKTCVADESAENCDKSLHTLFGDKLCTVATLRETYGEMADCCAKQEPERNECFLQHKDDNPNLPRLVRPEVDVMCTAFHDNEETFLKKYLYEIARRHPYFYAPELLFFAKRYKAAFTECCQAADKAACLLPKLDELRDEGKASSAKQRLKCASLQKFGERAFKAWAVARLSQRFPKAEFAEVSKLVTDLTKVHTECCHGDLLECADDRADLAKYICENQDSISSKLKECCEKPLLEKSHCIAEVENDEMPADLPSLAADFVESKDVCKNYAEAKDVFLGMFLYEYARRHPDYSVVLLLRLAKTYETTLEKCCAAADPHECYAKVFDEFKPLVEEPQNLIKQNCELFEQLGEYKFQNALLVRYTKKVPQVSTPTLVEVSRNLGKVGSKCCKHPEAKRMPCAEDYLSVVLNQLCVLHEKTPVSDRVTKCCTESLVNRRPCFSALEVDETYVPKEFNAETFTFHADICTLSEKERQIKKQTALVELVKHKPKATKEQLKAVMDDFAAFVEKCCKADDKETCFAEEGKKLVAASQAALGLHHHHHH

SEQ ID NO: 131 - protein, 1174 aa, synthetic construct
MKWVTFISLLFLFSSAYSRGVFRRSESPVTISRAGNAGELVSPLLLPPTRRRRRRHIQGPGPVLNLPSAAAAPPVARAPEAAGGGSRSEDYSSSPHSAAAAARPLAAEEKQAQSLQPSSSRRSSHYPAAVQSQAAAERGASATAKSRAISILQKKPRHQQLLPSLSSFFFSHRLPDMTAIIKEIVSRNKRRYQEDGFDLDLTYIYPNIIAMGFPAERLEGVYRNNIDDVVRFLDSKHKNHYKIYNLCAERHYDTAKFNCRVAQYPFEDHNPPQLELIKPFCEDLDQWLSEDDNHVAAIHCKAGKGRTGVMICAYLLHRGKFLKAQEALDFYGEVRTRDKKGVTIPSQRRYVYYYSYLLKNHLDYRPVALLFHKMMFETIPMFSGGTCNPQFVVCQLKVKIYSSNSGPTRREDKFMYFEFPQPLPVCGDIKVEFFHKQNKMLKKDKMFHFWVNTFFIPGPEETSEKVENGSLCDQEIDSICSIERADNDKEYLVLTLTKNDLDKANKDKANRYFSPNFKVKLYFTKTVEEPSNPEASSSTSVTPDVSDNEPDHYRYSDTTDSDPENEPFDEDQHTQITKVGFVGDAHKSEVAHRFKDLGEENFKALVLIAFAQYLQQCPFEDHVKLVNEVTEFAKTCVADESAENCDKSLHTLFGDKLCTVATLRETYGEMADCCAKQEPERNECFLQHKDDNPNLPRLVRPEVDVMCTAFHDNEETFLKKYLYEIARRHPYFYAPELLFFAKRYKAAFTECCQAADKAACLLPKLDELRDEGKASSAKQRLKCASLQKFGERAFKAWAVARLSQRFPKAEFAEVSKLVTDLTKVHTECCHGDLLECADDRADLAKYICENQDSISSKLKECCEKPLLEKSHCIAEVENDEMPADLPSLAADFVESKDVCKNYAEAKDVFLGMFLYEYARRHPDYSVVLLLRLAKTYETTLEKCCAAADPHECYAKVFDEFKPLVEEPQNLIKQNCELFEQLGEYKFQNALLVRYTKKVPQVSTPTLVEVSRNLGKVGSKCCKHPEAKRMPCAEDYLSVVLNQLCVLHEKTPVSDRVTKCCTESLVNRRPCFSALEVDETYVPKEFNAETFTFHADICTLSEKERQIKKQTALVELVKHKPKATKEQLKAVMDDFAAFVEKCCKADDKETCFAEEGKKLVAASQAALGLHHHHHH

SEQ ID NO: 132 - protein, 1175 aa, synthetic construct
MKWVTFISLLFLFSSAYSRGVFRRSESPVTISRAGNAGELVSPLLLPPTRRRRRRHIQGPGPVLNLPSAAAAPPVARAPEAAGGGSRSEDYSSSPHSAAAAARPLAAEEKQAQSLQPSSSRRSSHYPAAVQSQAAAERGASATAKSRAISILQKKPRHQQLLPSLSSFFFSHRLPDMTAIIKEIVSRNKRRYQEDGFDLDLTYIYPNIIAMGFPAERLEGVYRNNIDDVVRFLDSKHKNHYKIYNLCAERHYDTAKFNCRVAQYPFEDHNPPQLELIKPFCEDLDQWLSEDDNHVAAIHCKAGKGRTGVMICAYLLHRGKFLKAQEALDFYGEVRTRDKKGVTIPSQRRYVYYYSYLLKNHLDYRPVALLFHKMMFETIPMFSGGTCNPQFVVCQLKVKIYSSNSGPTRREDKFMYFEFPQPLPVCGDIKVEFFHKQNKMLKKDKMFHFWVNTFFIPGPEETSEKVENGSLCDQEIDSICSIERADNDKEYLVLTLTKNDLDKANKDKANRYFSPNFKVKLYFTKTVEEPSNPEASSSTSVTPDVSDNEPDHYRYSDTTDSDPENEPFDEDQHTQITKVFGFVGDAHKSEVAHRFKDLGEENFKALVLIAFAQYLQQCPFEDHVKLVNEVTEFAKTCVADESAENCDKSLHTLFGDKLCTVATLRETYGEMADCCAKQEPERNECFLQHKDDNPNLPRLVRPEVDVMCTAFHDNEETFLKKYLYEIARRHPYFYAPELLFFAKRYKAAFTECCQAADKAACLLPKLDELRDEGKASSAKQRLKCASLQKFGERAFKAWAVARLSQRFPKAEFAEVSKLVTDLTKVHTECCHGDLLECADDRADLAKYICENQDSISSKLKECCEKPLLEKSHCIAEVENDEMPADLPSLAADFVESKDVCKNYAEAKDVFLGMFLYEYARRHPDYSVVLLLRLAKTYETTLEKCCAAADPHECYAKVFDEFKPLVEEPQNLIKQNCELFEQLGEYKFQNALLVRYTKKVPQVSTPTLVEVSRNLGKVGSKCCKHPEAKRMPCAEDYLSVVLNQLCVLHEKTPVSDRVTKCCTESLVNRRPCFSALEVDETYVPKEFNAETFTFHADICTLSEKERQIKKQTALVELVKHKPKATKEQLKAVMDDFAAFVEKCCKADDKETCFAEEGKKLVAASQAALGLHHHHHH

SEQ ID NO: 133 - protein, 1160 aa, synthetic construct
MKWVTFISLLFLFSSAYSRGVFRRSESPVTISRAGNAGELVSPLLLPPTRRRRRRHIQGPGPVLNLPSAAAAPPVARAPEAAGGGSRSEDYSSSPHSAAAAARPLAAEEKQAQSLQPSSSRRSSHYPAAVQSQAAAERGASATAKSRAISILQKKPRHQQLLPSLSSFFFSHRLPDMEEPQSDPSVEPPLSQETFSDLWKLLPENNVLSPLPSQAMDDLMLSPDDIEQWFTEDPGPDEAPRMPEAAPPVAPAPAAPTPAAPAPAPSWPLSSSVPSQKTYQGSYGFRLGFLHSGTAKSVTCTYSPALNKMFCQLAKTCPVQLWVDSTPPPGTRVRAMAIYKQSQHMTEVVRRCPHHERCSDSDGLAPPQHLIRVEGNLRVEYLDDRNTFRHSVVVPYEPPEVGSDCTTIHYNYMCNSSCMGGMNRRPILTIITLEDSSGNLLGRNSFEVRVCACPGRDRRTEEENLRKKGEPHHELPPGSTKRALPNNTSSSPQPKKKPLDGEYFTLQIRGRERFEMFRELNEALELKDAQAGKEPGGSRAHSSHLKSKKGQSTSRHKKLMFKTEGPDSDDAHKSEVAHRFKDLGEENFKALVLIAFAQYLQQCPFEDHVKLVNEVTEFAKTCVADESAENCDKSLHTLFGDKLCTVATLRETYGEMADCCAKQEPERNECFLQHKDDNPNLPRLVRPEVDVMCTAFHDNEETFLKKYLYEIARRHPYFYAPELLFFAKRYKAAFTECCQAADKAACLLPKLDELRDEGKASSAKQRLKCASLQKFGERAFKAWAVARLSQRFPKAEFAEVSKLVTDLTKVHTECCHGDLLECADDRADLAKYICENQDSISSKLKECCEKPLLEKSHCIAEVENDEMPADLPSLAADFVESKDVCKNYAEAKDVFLGMFLYEYARRHPDYSVVLLLRLAKTYETTLEKCCAAADPHECYAKVFDEFKPLVEEPQNLIKQNCELFEQLGEYKFQNALLVRYTKKVPQVSTPTLVEVSRNLGKVGSKCCKHPEAKRMPCAEDYLSVVLNQLCVLHEKTPVSDRVTKCCTESLVNRRPCFSALEVDETYVPKEFNAETFTFHADICTLSEKERQIKKQTALVELVKHKPKATKEQLKAVMDDFAAFVEKCCKADDKETCFAEEGKKLVAASQAALGLHHHHHH

SEQ ID NO: 134 - protein, 152 aa, synthetic construct
SESPVTISRAGNAGELVSPLLLPPTRRRRRRHIQGPGPVLNLPDAAAAPPVARAPEAAGGGSRDEDYSSSPHSAAAAARPLAAEEKQAQSLQPDSDRRSSHYPAAVQDQAAAERGASADAKSRAISILQKKPRHQQLLPDLSDFFFDHRLPD

SEQ ID NO: 135 - DNA, 2274 bp, synthetic construct
  source 1..2274: mol_type = other DNA
gaattcccgccgccaccatggtgaagcagatcgagagcaagaccgctttccaggaggctctggacgctgctggcgataagctggtggtggtggacttttctgccacatggtgcggcccctgtaagatgatcaagcctttctttcactccctgagcgagaagtactctaacgtgatcttcctggaggtggacgtggacgattgccaggatgtggcttccgagtgcgaggtgaagtgtatgccaaccttccagttctttaagaagggccagaaagtgggcgagttttccggcgccaacaaggagaagctggaggctacaatcaatgagctggtgcatcaccatcaccatcaccagatcttcgtgaagaccctgacaggcaagaccatcacactggaggtggagccctccgatacaatcgagaatgtgaaggccaagatccaggacaaggagggcatcccccctgatcagcagaggctgatctttgctggcaagcagctggaggacggacggaccctgagcgattacaacatccagaaggagtctacactgcatctggtgctgagactgcgcggcgagaatctgtatttccagggcagcgagagccctgtgaccatctccagggccggaaatgcaggagagctggtgtctcctctgctgctgccacctacacggagaaggcgccggagacacatccagggaccaggacctgtgctgaacctgccaagcgccgccgccgccccacccgtggccagagccccagaggcagcaggaggaggctccagatctgaggactatagctcctctccacacagcgccgccgccgccgcccggcccctggccgccgaggagaagcaggcccagtctctgcagcccagctcctctaggcgcagctcccactaccctgcagcagtgcagtcccaggctgccgccgagaggggagcctctgccaccgcaaagtctcgcgccatcagcatcctgcagaagaagccacgccaccagcagctgctgccctctctgtctagcttctttttcagccaccggctgcccgacatgaccgccatcatcaaggagatcgtgagcagaaataagcggcggtaccaggaggatggcttcgacctggatctgacatatatctaccccaacatcatcgccatgggatttcctgcagagcggctggagggcgtgtacagaaacaatatcgacgatgtggtgaggttcctggactccaagcacaagaaccactataagatctacaatctgtgcgccgagaggcactatgataccgccaagttcaactgtcgcgtggcccagtacccctttgaggaccacaatcctccacagctggagctgatcaagcctttctgcgaggacctggatcagtggctgtccgaggacgataatcacgtggcagcaatccactgcaaggcaggcaagggcaggacaggcgtgatgatctgtgcctatctgctgcaccgcggcaagttcctgaaggcccaggaggccctggacttttacggcgaggtgaggacccgcgataagaagggcgtgacaatcccaagccagcggcggtacgtgtactattactcctacctgctgaagaaccacctggactacaggccagtggccctgctgtttcacaagatgatgttcgagacaatccctatgttctccggcggcacatgcaacccacagtttgtggtgtgccagctgaaggtgaagatctattcctctaattctggcccaacccggagagaggataagttcatgtactttgagttcccacagccactgcccgtgtgcggcgacatcaaggtggagtttttccacaagcagaacaagatgctgaagaaggataagatgtttcacttctgggtgaatacctttttcatcccaggccccgaggagacatccgagaaggtggagaatggctctctgtgcgaccaggagatcgatagcatctgttccatcgagcgggccgacaacgataaggagtacctggtgctgaccctgacaaagaatgacctggataaggccaacaaggacaaggccaatagatacttcagccccaacttcaaggtgaagctgtacttcaccaagacagtggaggagccttccaatccagaggccagctcctctaccagcgtgacacctgacgtgtccgataacgagccagaccactatcggtactccgataccacagactctgatccagagaacgagccctttgacgaggatcagcacacccagatcacaaaggtgtgataagcttggatcc

SEQ ID NO: 136 - DNA, 3501 bp, synthetic construct
  source 1..3501: mol_type = other DNA
gaattcccgccgccaccatgaaatgggtcacctttatcagcctgctgttcctgttcagcagcgcctacagcagaggcgtgttcagaagagatgcccacaagagcgaggtggcccacagattcaaggacctgggcgaagagaacttcaaggccctggtgctgatcgccttcgctcagtacctgcagcagtgcccctttgaggaccacgtgaagctggtcaacgaagtgaccgagttcgccaagacctgcgtggccgatgagagcgccgagaactgtgataagagcctgcacaccctgttcggcgacaagctgtgtacagtggccacactgagagaaacctacggcgagatggccgactgctgcgccaagcaagagcccgagagaaacgagtgcttcctgcagcacaaggacgacaaccccaacctgcctagactcgtgcggcctgaagtggacgtgatgtgcaccgccttccacgacaacgaggaaaccttcctgaagaagtacctgtacgagatcgccagacggcacccctacttttacgcccctgagctgctgttcttcgccaagcggtataaggccgccttcaccgagtgttgtcaggccgctgataaggctgcctgcctgctgcctaagctggacgagcttagagatgagggcaaagccagctccgccaagcagagactgaagtgtgccagcctgcagaagttcggcgagagagcctttaaggcctgggccgttgctagactgagccagagatttcccaaggccgagtttgccgaggtgtccaagctcgtgaccgacctgacaaaggtgcacaccgaatgctgccacggcgacctgctggaatgcgccgatgatagagccgacctggccaagtacatctgcgagaaccaggacagcatcagcagcaagctgaaagagtgctgcgagaagccactgctggaaaagagccactgtatcgccgaggtggaaaacgacgagatgcccgccgatctgccttctctggccgccgattttgtggaaagcaaggacgtgtgcaagaactacgccgaggccaaggatgtgttcctgggcatgtttctgtatgagtacgcccgcagacaccccgactactctgttgtgctgctgctgagactggccaaaacctacgagacaaccctggaaaagtgctgtgccgccgctgatcctcacgagtgttacgccaaggtgttcgacgagttcaagcctctggtggaagaaccccagaacctgatcaagcagaactgcgagctgttcgagcagctgggcgagtacaagttccagaacgccctgctcgtgcggtacaccaagaaggtgccccaggtttccacacctacactggttgaggtgtcccggaacctgggcaaagtgggcagcaagtgttgcaagcaccctgaggccaagagaatgccctgcgccgaggattacctgagcgtggtgctgaatcagctgtgcgtgctgcacgagaaaacccctgtgtccgacagagtgaccaagtgctgtaccgagagcctggtcaacagacggccttgctttagcgccctcgaggtggacgagacatacgtgcccaaagagttcaacgccgagacattcaccttccacgccgacatctgtaccctgagcgagaaagagcggcagatcaagaaacagactgccctggtggaactggtcaagcacaagcccaaggccaccaaagaacagctgaaggccgtgatggacgacttcgccgccttcgtggaaaaatgctgcaaggccgacgacaaagagacatgcttcgccgaagagggcaagaaactggtggccgcttctcaggctgctctcggacttatcagcagagctggaaatgccggcgagctggtgtctcctttgctgctgcctcctacccatatacaaggaccaggacctgtgctgaacctgccatctgctgctgcagctcctcctgtggctagagcacctgaagctgctggcggaggctctagaagcgaggactactctagcagccctcattctgctgccgctgccgctagacctctggctgccgaagaaaaacaggcccagagtctgcagcctagcagctccagaagaagcagccattatcctgccgccgtgcagtcacaggctgcagctgaaaggggagcctctgccacagccaagagcagagccatcagcatcctgcagaaaaagccccggcaccagcaactgctgccaagcctgagcagcttcttcttctctcaccggctgcctgacatgaccgccatcatcaaagaaatcgtgtctcggaacaagcggcgctaccaagaggacggcttcgacctggatctgacctacatctaccccaacatcattgccatgggcttccccgccgaaagactggaaggggtgtaccggaacaacatcgacgatgtcgtgcggttcctggactctaagcacaagaaccactacaagatctacaacctgtgcgccgagcggcactacgacaccgccaagttcaattgcagagtggcccagtatcctttcgaggatcacaaccctccacagctcgaactgattaagcccttctgcgaggacctggaccagtggctgagcgaggacgataatcacgtggccgccatccactgcaaagccggcaagggaagaaccggcgtgatgatctgtgcttacctgctgcaccggggcaagtttctgaaggcccaagaggctctggacttctacggcgaagtgcggaccagagacaagaaaggcgtgacaatccccagccagcggagatacgtgtactactacagctacctgctgaagaaccacctggactacagacccgtcgctctgctgtttcacaagatgatgttcgagactatccccatgttctccggcggcacctgtaatccccagttcgtcgtgtgtcagctcaaagtgaagatctactccagcaacagcggccccaccagacgcgaggataagttcatgtacttcgagttcccacagccactgcctgtgtgcggcgatatcaaggtggaatttttccataagcagaacaagatgctgaaaaaggacaagatgttccacttctgggtcaacaccttcttcatccccggacctgaagagacaagcgagaaggtcgagaacggctccctgtgcgaccaagagatcgacagcatctgctccatcgagcgggccgacaatgacaaagaatacctggtgctcaccctgaccaagaacgatctggacaaggccaacaaggataaggccaaccggtacttcagccccaacttcaaagtcaagctgtacttcaccaagaccgtcgaggaacccagcaatccagaggccagctctagcacctctgtgacccctgacgtgtccgataacgagcccgaccactacagatacagcgacaccaccgacagcgaccccgagaacgagccttttgatgaggaccagcacacccagatcaccaaggtgcaccaccaccatcaccactgataagctt

SEQ ID NO: 137 - DNA, 3537 bp, synthetic construct
  source 1..3537: mol_type = other DNA
gaattcccgccgccaccatgaggagaaaccagctgcccacccctgccttcctgctgctgtttctgctgctgccaagggacgctagcgagagccctgtgaccatctccagggccggaaatgcaggagagctggtgtctcctctgctgctgccacctacacggagaaggcgccggagacacatccagggaccaggacctgtgctgaacctgccaagcgccgccgccgccccacccgtggccagagccccagaggcagcaggaggaggctccagatctgaggactatagctcctctccacacagcgccgccgccgccgcccggcccctggccgccgaggagaagcaggcccagtctctgcagcccagctcctctaggcgcagctcccactaccctgcagcagtgcagtcccaggctgccgccgagaggggagcctctgccaccgcaaagtctcgcgccatcagcatcctgcagaagaagccacgccaccagcagctgctgccctctctgtctagcttctttttcagccaccggctgcccgacatgaccgccatcatcaaggagatcgtgagcagaaataagcggcggtaccaggaggatggcttcgacctggatctgacatatatctaccccaacatcatcgccatgggatttcctgcagagcggctggagggcgtgtacagaaacaatatcgacgatgtggtgaggttcctggactccaagcacaagaaccactataagatctacaatctgtgcgccgagaggcactatgataccgccaagttcaactgtcgcgtggcccagtacccctttgaggaccacaatcctccacagctggagctgatcaagcctttctgcgaggacctggatcagtggctgtccgaggacgataatcacgtggcagcaatccactgcaaggcaggcaagggcaggacaggcgtgatgatctgtgcctatctgctgcaccgcggcaagttcctgaaggcccaggaggccctggacttttacggcgaggtgaggacccgcgataagaagggcgtgacaatcccaagccagcggcggtacgtgtactattactcctacctgctgaagaaccacctggactacaggccagtggccctgctgtttcacaagatgatgttcgagacaatccctatgttctccggcggcacatgcaacccacagtttgtggtgtgccagctgaaggtgaagatctattcctctaattctggcccaacccggagagaggataagttcatgtactttgagttcccacagccactgcccgtgtgcggcgacatcaaggtggagtttttccacaagcagaacaagatgctgaagaaggataagatgtttcacttctgggtgaatacctttttcatcccaggccccgaggagacatccgagaaggtggagaatggctctctgtgcgaccaggagatcgatagcatctgttccatcgagcgggccgacaacgataaggagtacctggtgctgaccctgacaaagaatgacctggataaggccaacaaggacaaggccaatagatacttcagccccaacttcaaggtgaagctgtacttcaccaagacagtggaggagccttccaatccagaggccagctcctctaccagcgtgacacctgacgtgtccgataacgagccagaccactatcggtactccgataccacagactctgatccagagaacgagccctttgacgaggatcagcacacccagatcacaaaggtggatgcccacaagagcgaggtggcccaccgctttaaggacctgggcgaggagaacttcaaggccctggtgctgatcgcctttgcccagtacctgcagcagtgcccattcgaggatcacgtgaagctggtgaatgaggtgaccgagtttgccaagacatgcgtggccgacgagagcgccgagaactgtgataagtccctgcacaccctgttcggcgacaagctgtgcaccgtggccacactgcgggagacatatggcgagatggccgattgctgtgccaaacaggagcctgagagaaatgagtgctttctgcagcacaaggacgataacccaaatctgcctaggctggtgcggcccgaggtggacgtgatgtgcaccgcctttcacgataacgaggagacattcctgaagaagtatctgtacgagatcgcccggagacacccctatttctacgcccctgagctgctgtttttcgccaagagatacaaggccgcctttaccgagtgctgtcaggcagcagacaaggcagcatgcctgctgccaaagctggacgagctgagggatgagggcaaggccagctccgccaagcagagactgaagtgtgccagcctgcagaagtttggagagagggccttcaaggcctgggcagtggcaaggctgagccagcggttcccaaaggcagagttcgcagaggtgtccaagctggtgaccgatctgacaaaggtgcacaccgagtgctgtcacggcgacctgctggagtgcgcagacgatagggcagatctggccaagtacatctgtgagaaccaggactctatctctagcaagctgaaggagtgctgtgagaagcccctgctggagaagagccactgcatcgccgaggtggagaatgacgagatgcctgccgatctgccatctctggccgccgacttcgtggagagcaaggacgtgtgcaagaactatgccgaggccaaggacgtgtttctgggcatgttcctgtatgagtacgccaggcgccaccccgattattccgtggtgctgctgctgcggctggccaagacctacgagacaaccctggagaagtgctgtgccgccgccgacccccacgagtgctacgcaaaggtgtttgacgagttcaagccactggtggaggagccccagaacctgatcaagcagaattgtgagctgttcgagcagctgggcgagtataagtttcagaatgccctgctggtgagatacacaaagaaggtgcctcaggtgtccaccccaacactggtggaggtgtctaggaacctgggcaaggtcggcagcaagtgctgtaagcacccagaggcaaagaggatgccttgcgccgaggactatctgtctgtggtgctgaaccagctgtgcgtgctgcacgagaagacccccgtgagcgatcgggtgaccaagtgctgtacagagtctctggtgaatagacggccctgcttcagcgccctggaggtggacgagacatacgtgccaaaggagtttaacgccgagacattcaccttccacgccgacatctgtaccctgtccgagaaggagagacagatcaagaagcagacagccctggtggagctggtgaagcacaagcctaaggccaccaaggagcagctgaaggccgtgatggacgattttgccgccttcgtggagaagtgctgtaaggccgacgataaggagacatgcttcgccgaggagggcaagaagctggtcgccgcttcacaggctgctctggggctgcatcaccaccaccaccactgataagcttggatcc

SEQ ID NO: 138 - DNA, 3528 bp, synthetic construct
  source 1..3528: mol_type = other DNA
gaattcccgccgccaccatgctgtctctgagggtgacctgcctgatcctgagcgtggcctccaccgtgtggacaagcgagagccctgtgaccatctccagggccggaaatgcaggagagctggtgtctcctctgctgctgccacctacacggagaaggcgccggagacacatccagggaccaggacctgtgctgaacctgccaagcgccgccgccgccccacccgtggccagagccccagaggcagcaggaggaggctccagatctgaggactatagctcctctccacacagcgccgccgccgccgcccggcccctggccgccgaggagaagcaggcccagtctctgcagcccagctcctctaggcgcagctcccactaccctgcagcagtgcagtcccaggctgccgccgagaggggagcctctgccaccgcaaagtctcgcgccatcagcatcctgcagaagaagccacgccaccagcagctgctgccctctctgtctagcttctttttcagccaccggctgcccgacatgaccgccatcatcaaggagatcgtgagcagaaataagcggcggtaccaggaggatggcttcgacctggatctgacatatatctaccccaacatcatcgccatgggatttcctgcagagcggctggagggcgtgtacagaaacaatatcgacgatgtggtgaggttcctggactccaagcacaagaaccactataagatctacaatctgtgcgccgagaggcactatgataccgccaagttcaactgtcgcgtggcccagtacccctttgaggaccacaatcctccacagctggagctgatcaagcctttctgcgaggacctggatcagtggctgtccgaggacgataatcacgtggcagcaatccactgcaaggcaggcaagggcaggacaggcgtgatgatctgtgcctatctgctgcaccgcggcaagttcctgaaggcccaggaggccctggacttttacggcgaggtgaggacccgcgataagaagggcgtgacaatcccaagccagcggcggtacgtgtactattactcctacctgctgaagaaccacctggactacaggccagtggccctgctgtttcacaagatgatgttcgagacaatccctatgttctccggcggcacatgcaacccacagtttgtggtgtgccagctgaaggtgaagatctattcctctaattctggcccaacccggagagaggataagttcatgtactttgagttcccacagccactgcccgtgtgcggcgacatcaaggtggagtttttccacaagcagaacaagatgctgaagaaggataagatgtttcacttctgggtgaatacctttttcatcccaggccccgaggagacatccgagaaggtggagaatggctctctgtgcgaccaggagatcgatagcatctgttccatcgagcgggccgacaacgataaggagtacctggtgctgaccctgacaaagaatgacctggataaggccaacaaggacaaggccaatagatacttcagccccaacttcaaggtgaagctgtacttcaccaagacagtggaggagccttccaatccagaggccagctcctctaccagcgtgacacctgacgtgtccgataacgagccagaccactatcggtactccgataccacagactctgatccagagaacgagccctttgacgaggatcagcacacccagatcacaaaggtggatgcccacaagagcgaggtggcccaccgctttaaggacctgggcgaggagaacttcaaggccctggtgctgatcgcctttgcccagtacctgcagcagtgcccattcgaggatcacgtgaagctggtgaatgaggtgaccgagtttgccaagacatgcgtggccgacgagagcgccgagaactgtgataagtccctgcacaccctgttcggcgacaagctgtgcaccgtggccacactgcgggagacatatggcgagatggccgattgctgtgccaaacaggagcctgagagaaatgagtgctttctgcagcacaaggacgataacccaaatctgcctaggctggtgcggcccgaggtggacgtgatgtgcaccgcctttcacgataacgaggagacattcctgaagaagtatctgtacgagatcgcccggagacacccctatttctacgcccctgagctgctgtttttcgccaagagatacaaggccgcctttaccgagtgctgtcaggcagcagacaaggcagcatgcctgctgccaaagctggacgagctgagggatgagggcaaggccagctccgccaagcagagactgaagtgtgccagcctgcagaagtttggagagagggccttcaaggcctgggcagtggcaaggctgagccagcggttcccaaaggcagagttcgcagaggtgtccaagctggtgaccgatctgacaaaggtgcacaccgagtgctgtcacggcgacctgctggagtgcgcagacgatagggcagatctggccaagtacatctgtgagaaccaggactctatctctagcaagctgaaggagtgctgtgagaagcccctgctggagaagagccactgcatcgccgaggtggagaatgacgagatgcctgccgatctgccatctctggccgccgacttcgtggagagcaaggacgtgtgcaagaactatgccgaggccaaggacgtgtttctgggcatgttcctgtatgagtacgccaggcgccaccccgattattccgtggtgctgctgctgcggctggccaagacctacgagacaaccctggagaagtgctgtgccgccgccgacccccacgagtgctacgcaaaggtgtttgacgagttcaagccactggtggaggagccccagaacctgatcaagcagaattgtgagctgttcgagcagctgggcgagtataagtttcagaatgccctgctggtgagatacacaaagaaggtgcctcaggtgtccaccccaacactggtggaggtgtctaggaacctgggcaaggtcggcagcaagtgctgtaagcacccagaggcaaagaggatgccttgcgccgaggactatctgtctgtggtgctgaaccagctgtgcgtgctgcacgagaagacccccgtgagcgatcgggtgaccaagtgctgtacagagtctctggtgaatagacggccctgcttcagcgccctggaggtggacgagacatacgtgccaaaggagtttaacgccgagacattcaccttccacgccgacatctgtaccctgtccgagaaggagagacagatcaagaagcagacagccctggtggagctggtgaagcacaagcctaaggccaccaaggagcagctgaaggccgtgatggacgattttgccgccttcgtggagaagtgctgtaaggccgacgataaggagacatgcttcgccgaggagggcaagaagctggtcgccgcttcacaggctgctctggggctgcatcaccaccaccaccactgataagcttggatcc

SEQ ID NO: 139 - DNA, 3543 bp, synthetic construct
  source 1..3543: mol_type = other DNA
gaattcccgccgccaccatgaccccaagcatctcctggggactgctgctgctggctggactgtgctgtctggtgccttctttcctggctagcgagagccctgtgaccatctccagggccggaaatgcaggagagctggtgtctcctctgctgctgccacctacacggagaaggcgccggagacacatccagggaccaggacctgtgctgaacctgccaagcgccgccgccgccccacccgtggccagagccccagaggcagcaggaggaggctccagatctgaggactatagctcctctccacacagcgccgccgccgccgcccggcccctggccgccgaggagaagcaggcccagtctctgcagcccagctcctctaggcgcagctcccactaccctgcagcagtgcagtcccaggctgccgccgagaggggagcctctgccaccgcaaagtctcgcgccatcagcatcctgcagaagaagccacgccaccagcagctgctgccctctctgtctagcttctttttcagccaccggctgcccgacatgaccgccatcatcaaggagatcgtgagcagaaataagcggcggtaccaggaggatggcttcgacctggatctgacatatatctaccccaacatcatcgccatgggatttcctgcagagcggctggagggcgtgtacagaaacaatatcgacgatgtggtgaggttcctggactccaagcacaagaaccactataagatctacaatctgtgcgccgagaggcactatgataccgccaagttcaactgtcgcgtggcccagtacccctttgaggaccacaatcctccacagctggagctgatcaagcctttctgcgaggacctggatcagtggctgtccgaggacgataatcacgtggcagcaatccactgcaaggcaggcaagggcaggacaggcgtgatgatctgtgcctatctgctgcaccgcggcaagttcctgaaggcccaggaggccctggacttttacggcgaggtgaggacccgcgataagaagggcgtgacaatcccaagccagcggcggtacgtgtactattactcctacctgctgaagaaccacctggactacaggccagtggccctgctgtttcacaagatgatgttcgagacaatccctatgttctccggcggcacatgcaacccacagtttgtggtgtgccagctgaaggtgaagatctattcctctaattctggcccaacccggagagaggataagttcatgtactttgagttcccacagccactgcccgtgtgcggcgacatcaaggtggagtttttccacaagcagaacaagatgctgaagaaggataagatgtttcacttctgggtgaatacctttttcatcccaggccccgaggagacatccgagaaggtggagaatggctctctgtgcgaccaggagatcgatagcatctgttccatcgagcgggccgacaacgataaggagtacctggtgctgaccctgacaaagaatgacctggataaggccaacaaggacaaggccaatagatacttcagccccaacttcaaggtgaagctgtacttcaccaagacagtggaggagccttccaatccagaggccagctcctctaccagcgtgacacctgacgtgtccgataacgagccagaccactatcggtactccgataccacagactctgatccagagaacgagccctttgacgaggatcagcacacccagatcacaaaggtggatgcccacaagagcgaggtggcccaccgctttaaggacctgggcgaggagaacttcaaggccctggtgctgatcgcctttgcccagtacctgcagcagtgcccattcgaggatcacgtgaagctggtgaatgaggtgaccgagtttgccaagacatgcgtggccgacgagagcgccgagaactgtgataagtccctgcacaccctgttcggcgacaagctgtgcaccgtggccacactgcgggagacatatggcgagatggccgattgctgtgccaaacaggagcctgagagaaatgagtgctttctgcagcacaaggacgataacccaaatctgcctaggctggtgcggcccgaggtggacgtgatgtgcaccgcctttcacgataacgaggagacattcctgaagaagtatctgtacgagatcgcccggagacacccctatttctacgcccctgagctgctgtttttcgccaagagatacaaggccgcctttaccgagtgctgtcaggcagcagacaaggcagcatgcctgctgccaaagctggacgagctgagggatgagggcaaggccagctccgccaagcagagactgaagtgtgccagcctgcagaagtttggagagagggccttcaaggcctgggcagtggcaaggctgagccagcggttcccaaaggcagagttcgcagaggtgtccaagctggtgaccgatctgacaaaggtgcacaccgagtgctgtcacggcgacctgctggagtgcgcagacgatagggcagatctggccaagtacatctgtgagaaccaggactctatctctagcaagctgaaggagtgctgtgagaagcccctgctggagaagagccactgcatcgccgaggtggagaatgacgagatgcctgccgatctgccatctctggccgccgacttcgtggagagcaaggacgtgtgcaagaactatgccgaggccaaggacgtgtttctgggcatgttcctgtatgagtacgccaggcgccaccccgattattccgtggtgctgctgctgcggctggccaagacctacgagacaaccctggagaagtgctgtgccgccgccgacccccacgagtgctacgcaaaggtgtttgacgagttcaagccactggtggaggagccccagaacctgatcaagcagaattgtgagctgttcgagcagctgggcgagtataagtttcagaatgccctgctggtgagatacacaaagaaggtgcctcaggtgtccaccccaacactggtggaggtgtctaggaacctgggcaaggtcggcagcaagtgctgtaagcacccagaggcaaagaggatgccttgcgccgaggactatctgtctgtggtgctgaaccagctgtgcgtgctgcacgagaagacccccgtgagcgatcgggtgaccaagtgctgtacagagtctctggtgaatagacggccctgcttcagcgccctggaggtggacgagacatacgtgccaaaggagtttaacgccgagacattcaccttccacgccgacatctgtaccctgtccgagaaggagagacagatcaagaagcagacagccctggtggagctggtgaagcacaagcctaaggccaccaaggagcagctgaaggccgtgatggacgattttgccgccttcgtggagaagtgctgtaaggccgacgataaggagacatgcttcgccgaggagggcaagaagctggtcgccgcttcacaggctgctctggggctgcatcaccaccaccaccactgataagcttggatcc

SEQ ID NO: 140 - DNA, 3531 bp, synthetic construct
  source 1..3531: mol_type = other DNA
gaattcccgccgccaccatggagaccgacacactgctgctgtgggtgctgctgctgtgggtgccaggcagcaccggaagcgagagccctgtgaccatctccagggccggaaatgcaggagagctggtgtctcctctgctgctgccacctacacggagaaggcgccggagacacatccagggaccaggacctgtgctgaacctgccaagcgccgccgccgccccacccgtggccagagccccagaggcagcaggaggaggctccagatctgaggactatagctcctctccacacagcgccgccgccgccgcccggcccctggccgccgaggagaagcaggcccagtctctgcagcccagctcctctaggcgcagctcccactaccctgcagcagtgcagtcccaggctgccgccgagaggggagcctctgccaccgcaaagtctcgcgccatcagcatcctgcagaagaagccacgccaccagcagctgctgccctctctgtctagcttctttttcagccaccggctgcccgacatgaccgccatcatcaaggagatcgtgagcagaaataagcggcggtaccaggaggatggcttcgacctggatctgacatatatctaccccaacatcatcgccatgggatttcctgcagagcggctggagggcgtgtacagaaacaatatcgacgatgtggtgaggttcctggactccaagcacaagaaccactataagatctacaatctgtgcgccgagaggcactatgataccgccaagttcaactgtcgcgtggcccagtacccctttgaggaccacaatcctccacagctggagctgatcaagcctttctgcgaggacctggatcagtggctgtccgaggacgataatcacgtggcagcaatccactgcaaggcaggcaagggcaggacaggcgtgatgatctgtgcctatctgctgcaccgcggcaagttcctgaaggcccaggaggccctggacttttacggcgaggtgaggacccgcgataagaagggcgtgacaatcccaagccagcggcggtacgtgtactattactcctacctgctgaagaaccacctggactacaggccagtggccctgctgtttcacaagatgatgttcgagacaatccctatgttctccggcggcacatgcaacccacagtttgtggtgtgccagctgaaggtgaagatctattcctctaattctggcccaacccggagagaggataagttcatgtactttgagttcccacagccactgcccgtgtgcggcgacatcaaggtggagtttttccacaagcagaacaagatgctgaagaaggataagatgtttcacttctgggtgaatacctttttcatcccaggccccgaggagacatccgagaaggtggagaatggctctctgtgcgaccaggagatcgatagcatctgttccatcgagcgggccgacaacgataaggagtacctggtgctgaccctgacaaagaatgacctggataaggccaacaaggacaaggccaatagatacttcagccccaacttcaaggtgaagctgtacttcaccaagacagtggaggagccttccaatccagaggccagctcctctaccagcgtgacacctgacgtgtccgataacgagccagaccactatcggtactccgataccacagactctgatccagagaacgagccctttgacgaggatcagcacacccagatcacaaaggtggatgcccacaagagcgaggtggcccaccgctttaaggacctgggcgaggagaacttcaaggccctggtgctgatcgcctttgcccagtacctgcagcagtgcccattcgaggatcacgtgaagctggtgaatgaggtgaccgagtttgccaagacatgcgtggccgacgagagcgccgagaactgtgataagtccctgcacaccctgttcggcgacaagctgtgcaccgtggccacactgcgggagacatatggcgagatggccgattgctgtgccaaacaggagcctgagagaaatgagtgctttctgcagcacaaggacgataacccaaatctgcctaggctggtgcggcccgaggtggacgtgatgtgcaccgcctttcacgataacgaggagacattcctgaagaagtatctgtacgagatcgcccggagacacccctatttctacgcccctgagctgctgtttttcgccaagagatacaaggccgcctttaccgagtgctgtcaggcagcagacaaggcagcatgcctgctgccaaagctggacgagctgagggatgagggcaaggccagctccgccaagcagagactgaagtgtgccagcctgcagaagtttggagagagggccttcaaggcctgggcagtggcaaggctgagccagcggttcccaaaggcagagttcgcagaggtgtccaagctggtgaccgatctgacaaaggtgcacaccgagtgctgtcacggcgacctgctggagtgcgcagacgatagggcagatctggccaagtacatctgtgagaaccaggactctatctctagcaagctgaaggagtgctgtgagaagcccctgctggagaagagccactgcatcgccgaggtggagaatgacgagatgcctgccgatctgccatctctggccgccgacttcgtggagagcaaggacgtgtgcaagaactatgccgaggccaaggacgtgtttctgggcatgttcctgtatgagtacgccaggcgccaccccgattattccgtggtgctgctgctgcggctggccaagacctacgagacaaccctggagaagtgctgtgccgccgccgacccccacgagtgctacgcaaaggtgtttgacgagttcaagccactggtggaggagccccagaacctgatcaagcagaattgtgagctgttcgagcagctgggcgagtataagtttcagaatgccctgctggtgagatacacaaagaaggtgcctcaggtgtccaccccaacactggtggaggtgtctaggaacctgggcaaggtcggcagcaagtgctgtaagcacccagaggcaaagaggatgccttgcgccgaggactatctgtctgtggtgctgaaccagctgtgcgtgctgcacgagaagacccccgtgagcgatcgggtgaccaagtgctgtacagagtctctggtgaatagacggccctgcttcagcgccctggaggtggacgagacatacgtgccaaaggagtttaacgccgagacattcaccttccacgccgacatctgtaccctgtccgagaaggagagacagatcaagaagcagacagccctggtggagctggtgaagcacaagcctaaggccaccaaggagcagctgaaggccgtgatggacgattttgccgccttcgtggagaagtgctgtaaggccgacgataaggagacatgcttcgccgaggagggcaagaagctggtcgccgcttcacaggctgctctggggctgcatcaccaccaccaccactgataagcttggatcc

SEQ ID NO: 141 - DNA, 3531 bp, synthetic construct
  source 1..3531: mol_type = other DNA
gaattcccgccgccaccatggtgctgcagacccaggtgttcatcagcctgctgctgtggatctccggcgcctacggaagcgagagccctgtgaccatctccagggccggaaatgcaggagagctggtgtctcctctgctgctgccacctacacggagaaggcgccggagacacatccagggaccaggacctgtgctgaacctgccaagcgccgccgccgccccacccgtggccagagccccagaggcagcaggaggaggctccagatctgaggactatagctcctctccacacagcgccgccgccgccgcccggcccctggccgccgaggagaagcaggcccagtctctgcagcccagctcctctaggcgcagctcccactaccctgcagcagtgcagtcccaggctgccgccgagaggggagcctctgccaccgcaaagtctcgcgccatcagcatcctgcagaagaagccacgccaccagcagctgctgccctctctgtctagcttctttttcagccaccggctgcccgacatgaccgccatcatcaaggagatcgtgagcagaaataagcggcggtaccaggaggatggcttcgacctggatctgacatatatctaccccaacatcatcgccatgggatttcctgcagagcggctggagggcgtgtacagaaacaatatcgacgatgtggtgaggttcctggactccaagcacaagaaccactataagatctacaatctgtgcgccgagaggcactatgataccgccaagttcaactgtcgcgtggcccagtacccctttgaggaccacaatcctccacagctggagctgatcaagcctttctgcgaggacctggatcagtggctgtccgaggacgataatcacgtggcagcaatccactgcaaggcaggcaagggcaggacaggcgtgatgatctgtgcctatctgctgcaccgcggcaagttcctgaaggcccaggaggccctggacttttacggcgaggtgaggacccgcgataagaagggcgtgacaatcccaagccagcggcggtacgtgtactattactcctacctgctgaagaaccacctggactacaggccagtggccctgctgtttcacaagatgatgttcgagacaatccctatgttctccggcggcacatgcaacccacagtttgtggtgtgccagctgaaggtgaagatctattcctctaattctggcccaacccggagagaggataagttcatgtactttgagttcccacagccactgcccgtgtgcggcgacatcaaggtggagtttttccacaagcagaacaagatgctgaagaaggataagatgtttcacttctgggtgaatacctttttcatcccaggccccgaggagacatccgagaaggtggagaatggctctctgtgcgaccaggagatcgatagcatctgttccatcgagcgggccgacaacgataaggagtacctggtgctgaccctgacaaagaatgacctggataaggccaacaaggacaaggccaatagatacttcagccccaacttcaaggtgaagctgtacttcaccaagacagtggaggagccttccaatccagaggccagctcctctaccagcgtgacacctgacgtgtccgataacgagccagaccactatcggtactccgataccacagactctgatccagagaacgagccctttgacgaggatcagcacacccagatcacaaaggtggatgcccacaagagcgaggtggcccaccgctttaaggacctgggcgaggagaacttcaaggccctggtgctgatcgcctttgcccagtacctgcagcagtgcccattcgaggatcacgtgaagctggtgaatgaggtgaccgagtttgccaagacatgcgtggccgacgagagcgccgagaactgtgataagtccctgcacaccctgttcggcgacaagctgtgcaccgtggccacactgcgggagacatatggcgagatggccgattgctgtgccaaacaggagcctgagagaaatgagtgctttctgcagcacaaggacgataacccaaatctgcctaggctggtgcggcccgaggtggacgtgatgtgcaccgcctttcacgataacgaggagacattcctgaagaagtatctgtacgagatcgcccggagacacccctatttctacgcccctgagctgctgtttttcgccaagagatacaaggccgcctttaccgagtgctgtcaggcagcagacaaggcagcatgcctgctgccaaagctggacgagctgagggatgagggcaaggccagctccgccaagcagagactgaagtgtgccagcctgcagaagtttggagagagggccttcaaggcctgggcagtggcaaggctgagccagcggttcccaaaggcagagttcgcagaggtgtccaagctggtgaccgatctgacaaaggtgcacaccgagtgctgtcacggcgacctgctggagtgcgcagacgatagggcagatctggccaagtacatctgtgagaaccaggactctatctctagcaagctgaaggagtgctgtgagaagcccctgctggagaagagccactgcatcgccgaggtggagaatgacgagatgcctgccgatctgccatctctggccgccgacttcgtggagagcaaggacgtgtgcaagaactatgccgaggccaaggacgtgtttctgggcatgttcctgtatgagtacgccaggcgccaccccgattattccgtggtgctgctgctgcggctggccaagacctacgagacaaccctggagaagtgctgtgccgccgccgacccccacgagtgctacgcaaaggtgtttgacgagttcaagccactggtggaggagccccagaacctgatcaagcagaattgtgagctgttcgagcagctgggcgagtataagtttcagaatgccctgctggtgagatacacaaagaaggtgcctcaggtgtccaccccaacactggtggaggtgtctaggaacctgggcaaggtcggcagcaagtgctgtaagcacccagaggcaaagaggatgccttgcgccgaggactatctgtctgtggtgctgaaccagctgtgcgtgctgcacgagaagacccccgtgagcgatcgggtgaccaagtgctgtacagagtctctggtgaatagacggccctgcttcagcgccctggaggtggacgagacatacgtgccaaaggagtttaacgccgagacattcaccttccacgccgacatctgtaccctgtccgagaaggagagacagatcaagaagcagacagccctggtggagctggtgaagcacaagcctaaggccaccaaggagcagctgaaggccgtgatggacgattttgccgccttcgtggagaagtgctgtaaggccgacgataaggagacatgcttcgccgaggagggcaagaagctggtcgccgcttcacaggctgctctggggctgcatcaccaccaccaccactgataagcttggatcc

SEQ ID NO: 142 - DNA, 3519 bp, synthetic construct
  source 1..3519: mol_type = other DNA
gaattcccgccgccaccatgcccctgctgctgctgctgcctctgctgtgggccggcgctctggccagcgagagccctgtgaccatctccagggccggaaatgcaggagagctggtgtctcctctgctgctgccacctacacggagaaggcgccggagacacatccagggaccaggacctgtgctgaacctgccaagcgccgccgccgccccacccgtggccagagccccagaggcagcaggaggaggctccagatctgaggactatagctcctctccacacagcgccgccgccgccgcccggcccctggccgccgaggagaagcaggcccagtctctgcagcccagctcctctaggcgcagctcccactaccctgcagcagtgcagtcccaggctgccgccgagaggggagcctctgccaccgcaaagtctcgcgccatcagcatcctgcagaagaagccacgccaccagcagctgctgccctctctgtctagcttctttttcagccaccggctgcccgacatgaccgccatcatcaaggagatcgtgagcagaaataagcggcggtaccaggaggatggcttcgacctggatctgacatatatctaccccaacatcatcgccatgggatttcctgcagagcggctggagggcgtgtacagaaacaatatcgacgatgtggtgaggttcctggactccaagcacaagaaccactataagatctacaatctgtgcgccgagaggcactatgataccgccaagttcaactgtcgcgtggcccagtacccctttgaggaccacaatcctccacagctggagctgatcaagcctttctgcgaggacctggatcagtggctgtccgaggacgataatcacgtggcagcaatccactgcaaggcaggcaagggcaggacaggcgtgatgatctgtgcctatctgctgcaccgcggcaagttcctgaaggcccaggaggccctggacttttacggcgaggtgaggacccgcgataagaagggcgtgacaatcccaagccagcggcggtacgtgtactattactcctacctgctgaagaaccacctggactacaggccagtggccctgctgtttcacaagatgatgttcgagacaatccctatgttctccggcggcacatgcaacccacagtttgtggtgtgccagctgaaggtgaagatctattcctctaattctggcccaacccggagagaggataagttcatgtactttgagttcccacagccactgcccgtgtgcggcgacatcaaggtggagtttttccacaagcagaacaagatgctgaagaaggataagatgtttcacttctgggtgaatacctttttcatcccaggccccgaggagacatccgagaaggtggagaatggctctctgtgcgaccaggagatcgatagcatctgttccatcgagcgggccgacaacgataaggagtacctggtgctgaccctgacaaagaatgacctggataaggccaacaaggacaaggccaatagatacttcagccccaacttcaaggtgaagctgtacttcaccaagacagtggaggagccttccaatccagaggccagctcctctaccagcgtgacacctgacgtgtccgataacgagccagaccactatcggtactccgataccacagactctgatccagagaacgagccctttgacgaggatcagcacacccagatcacaaaggtggatgcccacaagagcgaggtggcccaccgctttaaggacctgggcgaggagaacttcaaggccctggtgctgatcgcctttgcccagtacctgcagcagtgcccattcgaggatcacgtgaagctggtgaatgaggtgaccgagtttgccaagacatgcgtggccgacgagagcgccgagaactgtgataagtccctgcacaccctgttcggcgacaagctgtgcaccgtggccacactgcgggagacatatggcgagatggccgattgctgtgccaaacaggagcctgagagaaatgagtgctttctgcagcacaaggacgataacccaaatctgcctaggctggtgcggcccgaggtggacgtgatgtgcaccgcctttcacgataacgaggagacattcctgaagaagtatctgtacgagatcgcccggagacacccctatttctacgcccctgagctgctgtttttcgccaagagatacaaggccgcctttaccgagtgctgtcaggcagcagacaaggcagcatgcctgctgccaaagctggacgagctgagggatgagggcaaggccagctccgccaagcagagactgaagtgtgccagcctgcagaagtttggagagagggccttcaaggcctgggcagtggcaaggctgagccagcggttcccaaaggcagagttcgcagaggtgtccaagctggtgaccgatctgacaaaggtgcacaccgagtgctgtcacggcgacctgctggagtgcgcagacgatagggcagatctggccaagtacatctgtgagaaccaggactctatctctagcaagctgaaggagtgctgtgagaagcccctgctggagaagagccactgcatcgccgaggtggagaatgacgagatgcctgccgatctgccatctctggccgccgacttcgtggagagcaaggacgtgtgcaagaactatgccgaggccaaggacgtgtttctgggcatgttcctgtatgagtacgccaggcgccaccccgattattccgtggtgctgctgctgcggctggccaagacctacgagacaaccctggagaagtgctgtgccgccgccgacccccacgagtgctacgcaaaggtgtttgacgagttcaagccactggtggaggagccccagaacctgatcaagcagaattgtgagctgttcgagcagctgggcgagtataagtttcagaatgccctgctggtgagatacacaaagaaggtgcctcaggtgtccaccccaacactggtggaggtgtctaggaacctgggcaaggtcggcagcaagtgctgtaagcacccagaggcaaagaggatgccttgcgccgaggactatctgtctgtggtgctgaaccagctgtgcgtgctgcacgagaagacccccgtgagcgatcgggtgaccaagtgctgtacagagtctctggtgaatagacggccctgcttcagcgccctggaggtggacgagacatacgtgccaaaggagtttaacgccgagacattcaccttccacgccgacatctgtaccctgtccgagaaggagagacagatcaagaagcagacagccctggtggagctggtgaagcacaagcctaaggccaccaaggagcagctgaaggccgtgatggacgattttgccgccttcgtggagaagtgctgtaaggccgacgataaggagacatgcttcgccgaggagggcaagaagctggtcgccgcttcacaggctgctctggggctgcatcaccaccaccaccactgataagcttggatcc

SEQ ID NO: 143 - DNA, 3534 bp, synthetic construct
  source 1..3534: mol_type = other DNA
gaattcccgccgccaccatgtggtggaggctgtggtggctcctcctgctgctgctgctgctgtggcccatggtgtgggccagcgagagccctgtgaccatctccagggccggaaatgcaggagagctggtgtctcctctgctgctgccacctacacggagaaggcgccggagacacatccagggaccaggacctgtgctgaacctgccaagcgccgccgccgccccacccgtggccagagccccagaggcagcaggaggaggctccagatctgaggactatagctcctctccacacagcgccgccgccgccgcccggcccctggccgccgaggagaagcaggcccagtctctgcagcccagctcctctaggcgcagctcccactaccctgcagcagtgcagtcccaggctgccgccgagaggggagcctctgccaccgcaaagtctcgcgccatcagcatcctgcagaagaagccacgccaccagcagctgctgccctctctgtctagcttctttttcagccaccggctgcccgacatgaccgccatcatcaaggagatcgtgagcagaaataagcggcggtaccaggaggatggcttcgacctggatctgacatatatctaccccaacatcatcgccatgggatttcctgcagagcggctggagggcgtgtacagaaacaatatcgacgatgtggtgaggttcctggactccaagcacaagaaccactataagatctacaatctgtgcgccgagaggcactatgataccgccaagttcaactgtcgcgtggcccagtacccctttgaggaccacaatcctccacagctggagctgatcaagcctttctgcgaggacctggatcagtggctgtccgaggacgataatcacgtggcagcaatccactgcaaggcaggcaagggcaggacaggcgtgatgatctgtgcctatctgctgcaccgcggcaagttcctgaaggcccaggaggccctggacttttacggcgaggtgaggacccgcgataagaagggcgtgacaatcccaagccagcggcggtacgtgtactattactcctacctgctgaagaaccacctggactacaggccagtggccctgctgtttcacaagatgatgttcgagacaatccctatgttctccggcggcacatgcaacccacagtttgtggtgtgccagctgaaggtgaagatctattcctctaattctggcccaacccggagagaggataagttcatgtactttgagttcccacagccactgcccgtgtgcggcgacatcaaggtggagtttttccacaagcagaacaagatgctgaagaaggataagatgtttcacttctgggtgaatacctttttcatcccaggccccgaggagacatccgagaaggtggagaatggctctctgtgcgaccaggagatcgatagcatctgttccatcgagcgggccgacaacgataaggagtacctggtgctgaccctgacaaagaatgacctggataaggccaacaaggacaaggccaatagatacttcagccccaacttcaaggtgaagctgtacttcaccaagacagtggaggagccttccaatccagaggccagctcctctaccagcgtgacacctgacgtgtccgataacgagccagaccactatcggtactccgataccacagactctgatccagagaacgagccctttgacgaggatcagcacacccagatcacaaaggtggatgcccacaagagcgaggtggcccaccgctttaaggacctgggcgaggagaacttcaaggccctggtgctgatcgcctttgcccagtacctgcagcagtgcccattcgaggatcacgtgaagctggtgaatgaggtgaccgagtttgccaagacatgcgtggccgacgagagcgccgagaactgtgataagtccctgcacaccctgttcggcgacaagctgtgcaccgtggccacactgcgggagacatatggcgagatggccgattgctgtgccaaacaggagcctgagagaaatgagtgctttctgcagcacaaggacgataacccaaatctgcctaggctggtgcggcccgaggtggacgtgatgtgcaccgcctttcacgataacgaggagacattcctgaagaagtatctgtacgagatcgcccggagacacccctatttctacgcccctgagctgctgtttttcgccaagagatacaaggccgcctttaccgagtgctgtcaggcagcagacaaggcagcatgcctgctgccaaagctggacgagctgagggatgagggcaaggccagctccgccaagcagagactgaagtgtgccagcctgcagaagtttggagagagggccttcaaggcctgggcagtggcaaggctgagccagcggttcccaaaggcagagttcgcagaggtgtccaagctggtgaccgatctgacaaaggtgcacaccgagtgctgtcacggcgacctgctggagtgcgcagacgatagggcagatctggccaagtacatctgtgagaaccaggactctatctctagcaagctgaaggagtgctgtgagaagcccctgctggagaagagccactgcatcgccgaggtggagaatgacgagatgcctgccgatctgccatctctggccgccgacttcgtggagagcaaggacgtgtgcaagaactatgccgaggccaaggacgtgtttctgggcatgttcctgtatgagtacgccaggcgccaccccgattattccgtggtgctgctgctgcggctggccaagacctacgagacaaccctggagaagtgctgtgccgccgccgacccccacgagtgctacgcaaaggtgtttgacgagttcaagccactggtggaggagccccagaacctgatcaagcagaattgtgagctgttcgagcagctgggcgagtataagtttcagaatgccctgctggtgagatacacaaagaaggtgcctcaggtgtccaccccaacactggtggaggtgtctaggaacctgggcaaggtcggcagcaagtgctgtaagcacccagaggcaaagaggatgccttgcgccgaggactatctgtctgtggtgctgaaccagctgtgcgtgctgcacgagaagacccccgtgagcgatcgggtgaccaagtgctgtacagagtctctggtgaatagacggccctgcttcagcgccctggaggtggacgagacatacgtgccaaaggagtttaacgccgagacattcaccttccacgccgacatctgtaccctgtccgagaaggagagacagatcaagaagcagacagccctggtggagctggtgaagcacaagcctaaggccaccaaggagcagctgaaggccgtgatggacgattttgccgccttcgtggagaagtgctgtaaggccgacgataaggagacatgcttcgccgaggagggcaagaagctggtcgccgcttcacaggctgctctggggctgcatcaccaccaccaccactgataagcttggatcc

SEQ ID NO: 144 - DNA, 3540 bp, synthetic construct
  source 1..3540: mol_type = other DNA
gaattcccgccgccaccatgtggtggaggctgtggtggctcctcctgctgctgctgctgctgtggcccatggtgtgggccgctgccagcgagagccctgtgaccatctccagggccggaaatgcaggagagctggtgtctcctctgctgctgccacctacacggagaaggcgccggagacacatccagggaccaggacctgtgctgaacctgccaagcgccgccgccgccccacccgtggccagagccccagaggcagcaggaggaggctccagatctgaggactatagctcctctccacacagcgccgccgccgccgcccggcccctggccgccgaggagaagcaggcccagtctctgcagcccagctcctctaggcgcagctcccactaccctgcagcagtgcagtcccaggctgccgccgagaggggagcctctgccaccgcaaagtctcgcgccatcagcatcctgcagaagaagccacgccaccagcagctgctgccctctctgtctagcttctttttcagccaccggctgcccgacatgaccgccatcatcaaggagatcgtgagcagaaataagcggcggtaccaggaggatggcttcgacctggatctgacatatatctaccccaacatcatcgccatgggatttcctgcagagcggctggagggcgtgtacagaaacaatatcgacgatgtggtgaggttcctggactccaagcacaagaaccactataagatctacaatctgtgcgccgagaggcactatgataccgccaagttcaactgtcgcgtggcccagtacccctttgaggaccacaatcctccacagctggagctgatcaagcctttctgcgaggacctggatcagtggctgtccgaggacgataatcacgtggcagcaatccactgcaaggcaggcaagggcaggacaggcgtgatgatctgtgcctatctgctgcaccgcggcaagttcctgaaggcccaggaggccctggacttttacggcgaggtgaggacccgcgataagaagggcgtgacaatcccaagccagcggcggtacgtgtactattactcctacctgctgaagaaccacctggactacaggccagtggccctgctgtttcacaagatgatgttcgagacaatccctatgttctccggcggcacatgcaacccacagtttgtggtgtgccagctgaaggtgaagatctattcctctaattctggcccaacccggagagaggataagttcatgtactttgagttcccacagccactgcccgtgtgcggcgacatcaaggtggagtttttccacaagcagaacaagatgctgaagaaggataagatgtttcacttctgggtgaatacctttttcatcccaggccccgaggagacatccgagaaggtggagaatggctctctgtgcgaccaggagatcgatagcatctgttccatcgagcgggccgacaacgataaggagtacctggtgctgaccctgacaaagaatgacctggataaggccaacaaggacaaggccaatagatacttcagccccaacttcaaggtgaagctgtacttcaccaagacagtggaggagccttccaatccagaggccagctcctctaccagcgtgacacctgacgtgtccgataacgagccagaccactatcggtactccgataccacagactctgatccagagaacgagccctttgacgaggatcagcacacccagatcacaaaggtggatgcccacaagagcgaggtggcccaccgctttaaggacctgggcgaggagaacttcaaggccctggtgctgatcgcctttgcccagtacctgcagcagtgcccattcgaggatcacgtgaagctggtgaatgaggtgaccgagtttgccaagacatgcgtggccgacgagagcgccgagaactgtgataagtccctgcacaccctgttcggcgacaagctgtgcaccgtggccacactgcgggagacatatggcgagatggccgattgctgtgccaaacaggagcctgagagaaatgagtgctttctgcagcacaaggacgataacccaaatctgcctaggctggtgcggcccgaggtggacgtgatgtgcaccgcctttcacgataacgaggagacattcctgaagaagtatctgtacgagatcgcccggagacacccctatttctacgcccctgagctgctgtttttcgccaagagatacaaggccgcctttaccgagtgctgtcaggcagcagacaaggcagcatgcctgctgccaaagctggacgagctgagggatgagggcaaggccagctccgccaagcagagactgaagtgtgccagcctgcagaagtttggagagagggccttcaaggcctgggcagtggcaaggctgagccagcggttcccaaaggcagagttcgcagaggtgtccaagctggtgaccgatctgacaaaggtgcacaccgagtgctgtcacggcgacctgctggagtgcgcagacgatagggcagatctggccaagtacatctgtgagaaccaggactctatctctagcaagctgaaggagtgctgtgagaagcccctgctggagaagagccactgcatcgccgaggtggagaatgacgagatgcctgccgatctgccatctctggccgccgacttcgtggagagcaaggacgtgtgcaagaactatgccgaggccaaggacgtgtttctgggcatgttcctgtatgagtacgccaggcgccaccccgattattccgtggtgctgctgctgcggctggccaagacctacgagacaaccctggagaagtgctgtgccgccgccgacccccacgagtgctacgcaaaggtgtttgacgagttcaagccactggtggaggagccccagaacctgatcaagcagaattgtgagctgttcgagcagctgggcgagtataagtttcagaatgccctgctggtgagatacacaaagaaggtgcctcaggtgtccaccccaacactggtggaggtgtctaggaacctgggcaaggtcggcagcaagtgctgtaagcacccagaggcaaagaggatgccttgcgccgaggactatctgtctgtggtgctgaaccagctgtgcgtgctgcacgagaagacccccgtgagcgatcgggtgaccaagtgctgtacagagtctctggtgaatagacggccctgcttcagcgccctggaggtggacgagacatacgtgccaaaggagtttaacgccgagacattcaccttccacgccgacatctgtaccctgtccgagaaggagagacagatcaagaagcagacagccctggtggagctggtgaagcacaagcctaaggccaccaaggagcagctgaaggccgtgatggacgattttgccgccttcgtggagaagtgctgtaaggccgacgataaggagacatgcttcgccgaggagggcaagaagctggtcgccgcttcacaggctgctctggggctgcatcaccaccaccaccactgataagcttggatcc

SEQ ID NO: 145 - DNA, 3537 bp, synthetic construct
  source 1..3537: mol_type = other DNA
gaattcccgccgccaccatgaaatgggtcaccttcctcctcctgctgttcgtgtctggttccgcctttagccggggggtcttccgacggtcagagtcaccagtcaccatcgctagggctggaaacgctggagagctgctgtcccctctgctgctgccccctacaaggagacggcgcaggagacacgtgcagggacctggaccagtgctgtccctgccatctgccgctgctgctccaccactggctagggctcctgaggccgctggcggaggctctcgctgcgaggactacccaagctccccacacagcgccgcttccgccgctcggccactggctgctgaggagaagcaggctcagagcctgcagccttctagctcccggcgctctagccactacccagctgctgtgcagggacaggctgctgctgagaggggagcttccgccaccgctaagtccagagccatctctatcctgcagaagaagccaaggcaccagcagctgctgccttccctgtcctctttctttttctctcacaggctgcctgatatgaccgccatcatcaaggagatcgtgagcagaaacaagaggagataccaggaggacggcttcgacctggatctgacatacatctaccctaacatcatcgctatgggatttccagctgagcggctggagggcgtgtacaggaacaacatcgacgatgtggtgcggttcctggactccaagcacaagaaccactacaagatctacaacctgtgcgctgagaggcactacgacaccgccaagttcaactgtagagtggctcagtacccttttgaggatcacaaccctccacagctggagctgatcaagccattctgcgaggacctggatcagtggctgagcgaggacgataaccacgtggctgccatccactgcaaggccggaaagggccggacaggagtgatgatctgtgcttacctgctgcaccgcggcaagttcctgaaggctcaggaggccctggacttttacggagaggtgaggaccagagataagaagggcgtgacaatcccttcccagcggcgctacgtgtactactactcttacctgctgaagaaccacctggactaccgcccagtggccctgctgtttcacaagatgatgttcgagacaatcccaatgttctctggaggcacatgcaacccccagtttgtggtgtgccagctgaaggtgaagatctacagctccaacagcggaccaaccaggagagaggacaagttcatgtactttgagttcccacagcctctgcccgtgtgcggcgatatcaaggtggagtttttccacaagcagaacaagatgctgaagaaggacaagatgtttcacttctgggtcaacacctttttcatccccggacctgaggagacaagcgagaaggtggagaacggctccctgtgcgaccaggagatcgattctatctgtagcatcgagcgggccgacaacgataaggagtacctggtgctgaccctgacaaagaacgacctggataaggctaacaaggataaggccaaccgctacttttcccccaacttcaaggtgaagctgtacttcaccaagacagtggaggagccttctaacccagaggcctctagctccacctctgtgacaccagacgtgagcgataacgagcccgaccactacaggtacagcgataccacagactccgatcccgagaacgagccttttgacgaggatcagcacagccagatcaccaaggtggaggctcacaagtccgagatcgcccacaggttcaaggacctgggagagcagcacttcaagggcctggtgctgatcgccttttctcagtacctgcagaagtgcccctacgaggagcacatcaagctggtgcaggaggtgaccgatttcgctaagacatgcgtggctgacgagaacgccgagaactgtgataagagcatccacacactgtttggagacaagctgtgcgccatccccaagctgagggacaactacggcgagctggctgattgctgtgccaagcaggagcctgagagaaacgagtgcttcctgcagcacaaggacgataaccccaacctgccaccttttcagcggcctgaggctgaggctatgtgcacctcttttcaggagaaccccaccagcttcctgggacactacctgcacgaggtggctcggcgccacccttacttctacgctccagagctgctgtactacgctgagaagtacaacgaggtgctgacccagtgctgtacagagagcgacaaggctgcctgcctgacccccaagctggatgctgtgaaggagaaggccctggtggctgccgtgcggcagcgcatgaagtgttctagcatgcagaggtttggagagagagccttcaaggcctgggctgtggctaggatgtcccagaggttccctaacgctgagttcgccgagatcaccaagctggccaccgacgtgacaaagatcaacaaggagtgctgtcacggcgatctgctggagtgcgctgacgatagagctgagctggccaagtacatgtgcgagaaccaggccacaatctcctctaagctgcaggcttgctgtgacaagccagtgctgcagaagagccagtgcctggccgagatcgagcacgacaacatcccagctgatctgccctccatcgctgccgacttcgtggaggataaggaggtgtgcaagaactacgctgaggccaaggacgtgttcctgggcaccttcctgtacgagtacagcaggagacaccccgactatagcgtgtccctgctgctgaggctggctaagaagtacgaggccaccctggagaagtgctgtgctgagggcgaccccccagcttgctacggaacagtgctggctgagttccagccactggtggaggagcctaagaacctggtgaagaccaactgtgagctgtacgagaagctgggagagtacggctttcagaacgccgtgctggtgagatacacacagaaggctccacaggtgtccacccccacactggtggaggctgccaggaacctgggaagagtgggcaccaagtgctgtacactgcctgaggctcagcggctgccatgcgtggaggattacctgtctgctatcctgaaccgcctgtgcgtgctgcacgagaagacccccgtgagcgagaaggtgacaaagtgctgttctggaagcctggtggagcggcgcccatgcttctccgccctgaccgtggacgagacatacgtgcccaaggagtttaaggctgagacattcaccttccactctgacatctgtaccctgccagataaggagaagcagatcaagaagcagacagctctggccgagctggtgaagcacaagcccaaggccaccgaggaccagctgaagacagtgatgggcgactttgctcagttcgtggataagtgctgtaaggctgccgacaaggataactgtttcgccaccgaaggaccaaatctcgtcgctcgcagcaaagaggcactcgctcaccatcatcaccatcattaagcttggatcc

SEQ ID NO: 146 - DNA, 3570 bp, synthetic construct
  source 1..3570: mol_type = other DNA
gaattcccgccgccaccatgaagtgggtgacctttattagcctgctgttcctgtttagttccgcatactcaagaggggtgtttagaagatacccctacgacgtgcccgactacgccagcgagagccctgtgaccatctccagggccggaaatgcaggagagctggtgtctcctctgctgctgccacctacacggagaaggcgccggagacacatccagggaccaggacctgtgctgaacctgccaagcgccgccgccgccccacccgtggccagagccccagaggcagcaggaggaggctccagatctgaggactatagctcctctccacacagcgccgccgccgccgcccggcccctggccgccgaggagaagcaggcccagtctctgcagcccagctcctctaggcgcagctcccactaccctgcagcagtgcagtcccaggctgccgccgagaggggagcctctgccaccgcaaagtctcgcgccatcagcatcctgcagaagaagccacgccaccagcagctgctgccctctctgtctagcttctttttcagccaccggctgcccgacatgaccgccatcatcaaggagatcgtgagcagaaataagcggcggtaccaggaggatggcttcgacctggatctgacatatatctaccccaacatcatcgccatgggatttcctgcagagcggctggagggcgtgtacagaaacaatatcgacgatgtggtgaggttcctggactccaagcacaagaaccactataagatctacaatctgtgcgccgagaggcactatgataccgccaagttcaactgtcgcgtggcccagtacccctttgaggaccacaatcctccacagctggagctgatcaagcctttctgcgaggacctggatcagtggctgtccgaggacgataatcacgtggcagcaatccactgcaaggcaggcaagggcaggacaggcgtgatgatctgtgcctatctgctgcaccgcggcaagttcctgaaggcccaggaggccctggacttttacggcgaggtgaggacccgcgataagaagggcgtgacaatcccaagccagcggcggtacgtgtactattactcctacctgctgaagaaccacctggactacaggccagtggccctgctgtttcacaagatgatgttcgagacaatccctatgttctccggcggcacatgcaacccacagtttgtggtgtgccagctgaaggtgaagatctattcctctaattctggcccaacccggagagaggataagttcatgtactttgagttcccacagccactgcccgtgtgcggcgacatcaaggtggagtttttccacaagcagaacaagatgctgaagaaggataagatgtttcacttctgggtgaatacctttttcatcccaggccccgaggagacatccgagaaggtggagaatggctctctgtgcgaccaggagatcgatagcatctgttccatcgagcgggccgacaacgataaggagtacctggtgctgaccctgacaaagaatgacctggataaggccaacaaggacaaggccaatagatacttcagccccaacttcaaggtgaagctgtacttcaccaagacagtggaggagccttccaatccagaggccagctcctctaccagcgtgacacctgacgtgtccgataacgagccagaccactatcggtactccgataccacagactctgatccagagaacgagccctttgacgaggatcagcacacccagatcacaaaggtggatgcccacaagagcgaggtggcccaccgctttaaggacctgggcgaggagaacttcaaggccctggtgctgatcgcctttgcccagtacctgcagcagtgcccattcgaggatcacgtgaagctggtgaatgaggtgaccgagtttgccaagacatgcgtggccgacgagagcgccgagaactgtgataagtccctgcacaccctgttcggcgacaagctgtgcaccgtggccacactgcgggagacatatggcgagatggccgattgctgtgccaaacaggagcctgagagaaatgagtgctttctgcagcacaaggacgataacccaaatctgcctaggctggtgcggcccgaggtggacgtgatgtgcaccgcctttcacgataacgaggagacattcctgaagaagtatctgtacgagatcgcccggagacacccctatttctacgcccctgagctgctgtttttcgccaagagatacaaggccgcctttaccgagtgctgtcaggcagcagacaaggcagcatgcctgctgccaaagctggacgagctgagggatgagggcaaggccagctccgccaagcagagactgaagtgtgccagcctgcagaagtttggagagagggccttcaaggcctgggcagtggcaaggctgagccagcggttcccaaaggcagagttcgcagaggtgtccaagctggtgaccgatctgacaaaggtgcacaccgagtgctgtcacggcgacctgctggagtgcgcagacgatagggcagatctggccaagtacatctgtgagaaccaggactctatctctagcaagctgaaggagtgctgtgagaagcccctgctggagaagagccactgcatcgccgaggtggagaatgacgagatgcctgccgatctgccatctctggccgccgacttcgtggagagcaaggacgtgtgcaagaactatgccgaggccaaggacgtgtttctgggcatgttcctgtatgagtacgccaggcgccaccccgattattccgtggtgctgctgctgcggctggccaagacctacgagacaaccctggagaagtgctgtgccgccgccgacccccacgagtgctacgcaaaggtgtttgacgagttcaagccactggtggaggagccccagaacctgatcaagcagaattgtgagctgttcgagcagctgggcgagtataagtttcagaatgccctgctggtgagatacacaaagaaggtgcctcaggtgtccaccccaacactggtggaggtgtctaggaacctgggcaaggtcggcagcaagtgctgtaagcacccagaggcaaagaggatgccttgcgccgaggactatctgtctgtggtgctgaaccagctgtgcgtgctgcacgagaagacccccgtgagcgatcgggtgaccaagtgctgtacagagtctctggtgaatagacggccctgcttcagcgccctggaggtggacgagacatacgtgccaaaggagtttaacgccgagacattcaccttccacgccgacatctgtaccctgtccgagaaggagagacagatcaagaagcagacagccctggtggagctggtgaagcacaagcctaaggccaccaaggagcagctgaaggccgtgatggacgattttgccgccttcgtggagaagtgctgtaaggccgacgataaggagacatgcttcgccgaggagggcaagaagctggtcgccgcttcacaggctgctctggggctgcatcaccaccaccaccactgataagcttggatcc

SEQ ID NO: 147 - DNA, 3525 bp, synthetic construct
  source 1..3525: mol_type = other DNA
gaattcccgccgccaccatgaagtgggtgacctttattagcctgctgttcctgtttagttccgcatactcaagaggggtgtttagaagaagcgagagccctgtgaccatctccagggccggaaatgcaggagagctggtgtctcctctgctgctgccacctacacggagaaggcgccggagacacatccagggaccaggacctgtgctgaacctgccaagcgccgccgccgccccacccgtggccagagccccagaggcagcaggaggaggctccagatctgaggactatagctcctctccacacagcgccgccgccgccgcccggcccctggccgccgaggagaagcaggcccagtctctgcagcccagctcctctaggcgcagctcccactaccctgcagcagtgcagtcccaggctgccgccgagaggggagcctctgccaccgcaaagtctcgcgccatcagcatcctgcagaagaagccacgccaccagcagctgctgccctctctgtctagcttctttttcagccaccggctgcccgacatgaccgccatcatcaaggagatcgtgagcagaaataagcggcggtaccaggaggatggcttcgacctggatctgacatatatctaccccaacatcatcgccatgggatttcctgcagagcggctggagggcgtgtacagaaacaatatcgacgatgtggtgaggttcctggactccaagcacaagaaccactataagatctacaatctgtgcgccgagaggcactatgataccgccaagttcaactgtcgcgtggcccagtacccctttgaggaccacaatcctccacagctggagctgatcaagcctttctgcgaggacctggatcagtggctgtccgaggacgataatcacgtggcagcaatccactgcaaggcaggcaagggcaggacaggcgtgatgatctgtgcctatctgctgcaccgcggcaagttcctgaaggcccaggaggccctggacttttacggcgaggtgaggacccgcgataagaagggcgtgacaatcccaagccagcggcggtacgtgtactattactcctacctgctgaagaaccacctggactacaggccagtggccctgctgtttcacaagatgatgttcgagacaatccctatgttctccggcggcacatgcaacccacagtttgtggtgtgccagctgaaggtgaagatctattcctctaattctggcccaacccggagagaggataagttcatgtactttgagttcccacagccactgcccgtgtgcggcgacatcaaggtggagtttttccacaagcagaacaagatgctgaagaaggataagatgtttcacttctgggtgaatacctttttcatcccaggccccgaggagacatccgagaaggtggagaatggctctctgtgcgaccaggagatcgatagcatctgttccatcgagcgggccgacaacgataaggagtacctggtgctgaccctgacaaagaatgacctggataaggccaacaaggacaaggccaatagatacttcagccccaacttcaaggtgaagctgtacttcaccaagacagtggaggagccttccaatccagaggccagctcctctaccagcgtgacacctgacgtgtccgataacgagccagaccactatcggtactccgataccacagactctgatccagagaacgagccctttgacgaggatcagcacacccagatcacaaaggtggatgcccacaagagcgaggtggcccaccgctttaaggacctgggcgaggagaacttcaaggccctggtgctgatcgcctttgcccagtacctgcagcagagcccattcgaggatcacgtgaagctggtgaatgaggtgaccgagtttgccaagacatgcgtggccgacgagagcgccgagaactgtgataagtccctgcacaccctgttcggcgacaagctgtgcaccgtggccacactgcgggagacatatggcgagatggccgattgctgtgccaaacaggagcctgagagaaatgagtgctttctgcagcacaaggacgataacccaaatctgcctaggctggtgcggcccgaggtggacgtgatgtgcaccgcctttcacgataacgaggagacattcctgaagaagtatctgtacgagatcgcccggagacacccctatttctacgcccctgagctgctgtttttcgccaagagatacaaggccgcctttaccgagtgctgtcaggcagcagacaaggcagcatgcctgctgccaaagctggacgagctgagggatgagggcaaggccagctccgccaagcagagactgaagtgtgccagcctgcagaagtttggagagagggccttcaaggcctgggcagtggcaaggctgagccagcggttcccaaaggcagagttcgcagaggtgtccaagctggtgaccgatctgacaaaggtgcacaccgagtgctgtcacggcgacctgctggagtgcgcagacgatagggcagatctggccaagtacatctgtgagaaccaggactctatctctagcaagctgaaggagtgctgtgagaagcccctgctggagaagagccactgcatcgccgaggtggagaatgacgagatgcctgccgatctgccatctctggccgccgacttcgtggagagcaaggacgtgtgcaagaactatgccgaggccaaggacgtgtttctgggcatgttcctgtatgagtacgccaggcgccaccccgattattccgtggtgctgctgctgcggctggccaagacctacgagacaaccctggagaagtgctgtgccgccgccgacccccacgagtgctacgcaaaggtgtttgacgagttcaagccactggtggaggagccccagaacctgatcaagcagaattgtgagctgttcgagcagctgggcgagtataagtttcagaatgccctgctggtgagatacacaaagaaggtgcctcaggtgtccaccccaacactggtggaggtgtctaggaacctgggcaaggtcggcagcaagtgctgtaagcacccagaggcaaagaggatgccttgcgccgaggactatctgtctgtggtgctgaaccagctgtgcgtgctgcacgagaagacccccgtgagcgatcgggtgaccaagtgctgtacagagtctctggtgaatagacggccctgcttcagcgccctggaggtggacgagacatacgtgccaaaggagtttaacgccgagacattcaccttccacgccgacatctgtaccctgtccgagaaggagagacagatcaagaagcagacagccctggtggagctggtgaagcacaagcctaaggccaccaaggagcagctgaaggccgtgatggacgattttgccgccttcgtggagaagtgctgtaaggccgacgataaggagacatgcttcgccgaggagggcaagaagctggtcgccgcttcacaggctgctctggggctgtgataagcttggatcc

SEQ ID NO: 148 - DNA, 3507 bp, synthetic construct
  source 1..3507: mol_type = other DNA
gaattcccgccgccaccatgaagtgggtgacctttattagcctgctgttcctgtttagttccgcatactcaagaggggtgtttagaagaatctccagggccggaaatgcaggagagctggtgtctcctctgctgctgccacctacacggagaaggcgccggagacacatccagggaccaggacctgtgctgaacctgccaagcgccgccgccgccccacccgtggccagagccccagaggcagcaggaggaggctccagatctgaggactatagctcctctccacacagcgccgccgccgccgcccggcccctggccgccgaggagaagcaggcccagtctctgcagcccagctcctctaggcgcagctcccactaccctgcagcagtgcagtcccaggctgccgccgagaggggagcctctgccaccgcaaagtctcgcgccatcagcatcctgcagaagaagccacgccaccagcagctgctgccctctctgtctagcttctttttcagccaccggctgcccgacatgaccgccatcatcaaggagatcgtgagcagaaataagcggcggtaccaggaggatggcttcgacctggatctgacatatatctaccccaacatcatcgccatgggatttcctgcagagcggctggagggcgtgtacagaaacaatatcgacgatgtggtgaggttcctggactccaagcacaagaaccactataagatctacaatctgtgcgccgagaggcactatgataccgccaagttcaactgtcgcgtggcccagtacccctttgaggaccacaatcctccacagctggagctgatcaagcctttctgcgaggacctggatcagtggctgtccgaggacgataatcacgtggcagcaatccactgcaaggcaggcaagggcaggacaggcgtgatgatctgtgcctatctgctgcaccgcggcaagttcctgaaggcccaggaggccctggacttttacggcgaggtgaggacccgcgataagaagggcgtgacaatcccaagccagcggcggtacgtgtactattactcctacctgctgaagaaccacctggactacaggccagtggccctgctgtttcacaagatgatgttcgagacaatccctatgttctccggcggcacatgcaacccacagtttgtggtgtgccagctgaaggtgaagatctattcctctaattctggcccaacccggagagaggataagttcatgtactttgagttcccacagccactgcccgtgtgcggcgacatcaaggtggagtttttccacaagcagaacaagatgctgaagaaggataagatgtttcacttctgggtgaatacctttttcatcccaggccccgaggagacatccgagaaggtggagaatggctctctgtgcgaccaggagatcgatagcatctgttccatcgagcgggccgacaacgataaggagtacctggtgctgaccctgacaaagaatgacctggataaggccaacaaggacaaggccaatagatacttcagccccaacttcaaggtgaagctgtacttcaccaagacagtggaggagccttccaatccagaggccagctcctctaccagcgtgacacctgacgtgtccgataacgagccagaccactatcggtactccgataccacagactctgatccagagaacgagccctttgacgaggatcagcacacccagatcacaaaggtggatgcccacaagagcgaggtggcccaccgctttaaggacctgggcgaggagaacttcaaggccctggtgctgatcgcctttgcccagtacctgcagcagagcccattcgaggatcacgtgaagctggtgaatgaggtgaccgagtttgccaagacatgcgtggccgacgagagcgccgagaactgtgataagtccctgcacaccctgttcggcgacaagctgtgcaccgtggccacactgcgggagacatatggcgagatggccgattgctgtgccaaacaggagcctgagagaaatgagtgctttctgcagcacaaggacgataacccaaatctgcctaggctggtgcggcccgaggtggacgtgatgtgcaccgcctttcacgataacgaggagacattcctgaagaagtatctgtacgagatcgcccggagacacccctatttctacgcccctgagctgctgtttttcgccaagagatacaaggccgcctttaccgagtgctgtcaggcagcagacaaggcagcatgcctgctgccaaagctggacgagctgagggatgagggcaaggccagctccgccaagcagagactgaagtgtgccagcctgcagaagtttggagagagggccttcaaggcctgggcagtggcaaggctgagccagcggttcccaaaggcagagttcgcagaggtgtccaagctggtgaccgatctgacaaaggtgcacaccgagtgctgtcacggcgacctgctggagtgcgcagacgatagggcagatctggccaagtacatctgtgagaaccaggactctatctctagcaagctgaaggagtgctgtgagaagcccctgctggagaagagccactgcatcgccgaggtggagaatgacgagatgcctgccgatctgccatctctggccgccgacttcgtggagagcaaggacgtgtgcaagaactatgccgaggccaaggacgtgtttctgggcatgttcctgtatgagtacgccaggcgccaccccgattattccgtggtgctgctgctgcggctggccaagacctacgagacaaccctggagaagtgctgtgccgccgccgacccccacgagtgctacgcaaaggtgtttgacgagttcaagccactggtggaggagccccagaacctgatcaagcagaattgtgagctgttcgagcagctgggcgagtataagtttcagaatgccctgctggtgagatacacaaagaaggtgcctcaggtgtccaccccaacactggtggaggtgtctaggaacctgggcaaggtcggcagcaagtgctgtaagcacccagaggcaaagaggatgccttgcgccgaggactatctgtctgtggtgctgaaccagctgtgcgtgctgcacgagaagacccccgtgagcgatcgggtgaccaagtgctgtacagagtctctggtgaatagacggccctgcttcagcgccctggaggtggacgagacatacgtgccaaaggagtttaacgccgagacattcaccttccacgccgacatctgtaccctgtccgagaaggagagacagatcaagaagcagacagccctggtggagctggtgaagcacaagcctaaggccaccaaggagcagctgaaggccgtgatggacgattttgccgccttcgtggagaagtgctgtaaggccgacgataaggagacatgcttcgccgaggagggcaagaagctggtcgccgcttcacaggctgctctggggctgtgataagcttggatcc

SEQ ID NO: 149 - DNA, 2943 bp, synthetic construct
  source 1..2943: mol_type = other DNA
gaattcccgccgccaccatgaagtgggtgacctttattagcctgctgttcctgtttagttccgcatactcaagaggggtgtttagaagaagcgagagccctgtgaccatctccagggccggaaatgcaggagagctggtgtctcctctgctgctgccacctacacggagaaggcgccggagacacatccagggaccaggacctgtgctgaacctgccaagcgccgccgccgccccacccgtggccagagccccagaggcagcaggaggaggctccagatctgaggactatagctcctctccacacagcgccgccgccgccgcccggcccctggccgccgaggagaagcaggcccagtctctgcagcccagctcctctaggcgcagctcccactaccctgcagcagtgcagtcccaggctgccgccgagaggggagcctctgccaccgcaaagtctcgcgccatcagcatcctgcagaagaagccacgccaccagcagctgctgccctctctgtctagcttctttttcagccaccggctgcccgacatgaccgccatcatcaaggagatcgtgagcagaaataagcggcggtaccaggaggatggcttcgacctggatctgacatatatctaccccaacatcatcgccatgggatttcctgcagagcggctggagggcgtgtacagaaacaatatcgacgatgtggtgaggttcctggactccaagcacaagaaccactataagatctacaatctgtgcgccgagaggcactatgataccgccaagttcaactgtcgcgtggcccagtacccctttgaggaccacaatcctccacagctggagctgatcaagcctttctgcgaggacctggatcagtggctgtccgaggacgataatcacgtggcagcaatccactgcaaggcaggcaagggcaggacaggcgtgatgatctgtgcctatctgctgcaccgcggcaagttcctgaaggcccaggaggccctggacttttacggcgaggtgaggacccgcgataagaagggcgtgacaatcccaagccagcggcggtacgtgtactattactcctacctgctgaagaaccacctggactacaggccagtggccctgctgtttcacaagatgatgttcgagacaatccctatgttctccggcggcacatgcaacccacagtttgtggtgtgccagctgaaggtgaagatctattcctctaattctggcccaacccggagagaggataagttcatgtactttgagttcccacagccactgcccgtgtgcggcgacatcaaggtggagtttttccacaagcagaacaagatgctgaagaaggataagatgtttcacttctgggtgaatacctttttcatcccaggccccgaggagacatccgagaaggtggagaatggctctctgtgcgaccaggagatcgatagcatctgttccatcgagcgggccgacaacgataaggagtacctggtgctgaccctgacaaagaatgacctggataaggccaacaaggacaaggccaatagatacttcagccccaacttcaaggtgaagctgtacttcaccaagacagtggaggagccttccaatccagaggccagctcctctaccagcgtgacacctgacgtgtccgataacgagccagaccactatcggtactccgataccacagactctgatccagagaacgagccctttgacgaggatcagcacacccagatcacaaaggtggatgcccacaagagcgaggtggcccaccgctttaaggacctgggcgaggagaacttcaaggccctggtgctgatcgcctttgcccagtacctgcagcagtgcccattcgaggatcacgtgaagctggtgaatgaggtgaccgagtttgccaagacatgcgtggccgacgagagcgccgagaactgtgataagtccctgcacaccctgttcggcgacaagctgtgcaccgtggccacactgcgggagacatatggcgagatggccgattgctgtgccaaacaggagcctgagagaaatgagtgctttctgcagcacaaggacgataacccaaatctgcctaggctggtgcggcccgaggtggacgtgatgtgcaccgcctttcacgataacgaggagacattcctgaagaagtatctgtacgagatcgcccggagacacccctatttctacgcccctgagctgctgtttttcgccaagagatacaaggccgcctttaccgagtgctgtcaggcagcagacaaggcagcatgcctgctgccaaagctggacgagctgagggatgagggcaaggccagctccgccaagcagagactgaagtgtgccagcctgcagaagtttggagagagggccttcaaggcctgggcagtggcaaggctgagccagcggttcccaaaggcagagttcgcagaggtgtccaagctggtgaccgatctgacaaaggtgcacaccgagtgctgtcacggcgacctgctggagtgcgcagacgatagggcagatctggccaagtacatctgtgagaaccaggactctatctctagcaagctgaaggagtgctgtgagaagcccctgctggagaagagccactgcatcgccgaggtggagaatgacgagatgcctgccgatctgccatctctggccgccgacttcgtggagagcaaggacgtgtgcaagaactatgccgaggccaaggacgtgtttctgggcatgttcctgtatgagtacgccaggcgccaccccgattattccgtggtgctgctgctgcggctggccaagacctacgagacaaccctggagaagtgctgtgccgccgccgacccccacgagtgctacgcaaaggtgtttgacgagttcaagccactggtggaggagccccagcatcaccaccaccaccactgataagcttggatcc

SEQ ID NO: 150 - DNA, 2379 bp, synthetic construct
  source 1..2379: mol_type = other DNA
gaattcccgccgccaccatgaagtgggtgacctttattagcctgctgttcctgtttagttccgcatactcaagaggggtgtttagaagaagcgagagccctgtgaccatctccagggccggaaatgcaggagagctggtgtctcctctgctgctgccacctacacggagaaggcgccggagacacatccagggaccaggacctgtgctgaacctgccaagcgccgccgccgccccacccgtggccagagccccagaggcagcaggaggaggctccagatctgaggactatagctcctctccacacagcgccgccgccgccgcccggcccctggccgccgaggagaagcaggcccagtctctgcagcccagctcctctaggcgcagctcccactaccctgcagcagtgcagtcccaggctgccgccgagaggggagcctctgccaccgcaaagtctcgcgccatcagcatcctgcagaagaagccacgccaccagcagctgctgccctctctgtctagcttctttttcagccaccggctgcccgacatgaccgccatcatcaaggagatcgtgagcagaaataagcggcggtaccaggaggatggcttcgacctggatctgacatatatctaccccaacatcatcgccatgggatttcctgcagagcggctggagggcgtgtacagaaacaatatcgacgatgtggtgaggttcctggactccaagcacaagaaccactataagatctacaatctgtgcgccgagaggcactatgataccgccaagttcaactgtcgcgtggcccagtacccctttgaggaccacaatcctccacagctggagctgatcaagcctttctgcgaggacctggatcagtggctgtccgaggacgataatcacgtggcagcaatccactgcaaggcaggcaagggcaggacaggcgtgatgatctgtgcctatctgctgcaccgcggcaagttcctgaaggcccaggaggccctggacttttacggcgaggtgaggacccgcgataagaagggcgtgacaatcccaagccagcggcggtacgtgtactattactcctacctgctgaagaaccacctggactacaggccagtggccctgctgtttcacaagatgatgttcgagacaatccctatgttctccggcggcacatgcaacccacagtttgtggtgtgccagctgaaggtgaagatctattcctctaattctggcccaacccggagagaggataagttcatgtactttgagttcccacagccactgcccgtgtgcggcgacatcaaggtggagtttttccacaagcagaacaagatgctgaagaaggataagatgtttcacttctgggtgaatacctttttcatcccaggccccgaggagacatccgagaaggtggagaatggctctctgtgcgaccaggagatcgatagcatctgttccatcgagcgggccgacaacgataaggagtacctggtgctgaccctgacaaagaatgacctggataaggccaacaaggacaaggccaatagatacttcagccccaacttcaaggtgaagctgtacttcaccaagacagtggaggagccttccaatccagaggccagctcctctaccagcgtgacacctgacgtgtccgataacgagccagaccactatcggtactccgataccacagactctgatccagagaacgagccctttgacgaggatcagcacacccagatcacaaaggtggatgcccacaagagcgaggtggcccaccgctttaaggacctgggcgaggagaacttcaaggccctggtgctgatcgcctttgcccagtacctgcagcagtgcccattcgaggatcacgtgaagctggtgaatgaggtgaccgagtttgccaagacatgcgtggccgacgagagcgccgagaactgtgataagtccctgcacaccctgttcggcgacaagctgtgcaccgtggccacactgcgggagacatatggcgagatggccgattgctgtgccaaacaggagcctgagagaaatgagtgctttctgcagcacaaggacgataacccaaatctgcctaggctggtgcggcccgaggtggacgtgatgtgcaccgcctttcacgataacgaggagacattcctgaagaagtatctgtacgagatcgcccggagacacccctatttctacgcccctgagctgctgtttttcgccaagagatacaaggccgcctttaccgagtgctgtcaggcagcagacaaggcagcatgcctgctgccaaagctggacgagctgagggatgagggcaaggccagctccgccaagcagagacatcaccaccaccaccactgataagcttggatcc

SEQ ID NO: 151 - DNA, 3441 bp, synthetic construct
  source 1..3441: mol_type = other DNA
gaattcccgccgccaccatgaagtgggtgacctttattagcctgctgttcctgtttagttccgcatactcaagaggggtgtttagaagaagcgagagccctgtgaccatctccagggccggaaatgcaggagagctggtgtctcctctgctgctgccacctacacggagaaggcgccggagacacatccagggaccaggacctgtgctgaacctgccaagcgccgccgccgccccacccgtggccagagccccagaggcagcaggaggaggctccagatctgaggactatagctcctctccacacagcgccgccgccgccgcccggcccctggccgccgaggagaagcaggcccagtctctgcagcccagctcctctaggcgcagctcccactaccctgcagcagtgcagtcccaggctgccgccgagaggggagcctctgccaccgcaaagtctcgcgccatcagcatcctgcagaagaagccacgccaccagcagctgctgccctctctgtctagcttctttttcagccaccggctgcccgacatgaccgccatcatcaaggagatcgtgagcagaaataagcggcggtaccaggaggatggcttcgacctggatctgacatatatctaccccaacatcatcgccatgggatttcctgcagagcggctggagggcgtgtacagaaacaatatcgacgatgtggtgaggttcctggactccaagcacaagaaccactataagatctacaatctgtgcgccgagaggcactatgataccgccaagttcaactgtcgcgtggcccagtacccctttgaggaccacaatcctccacagctggagctgatcaagcctttctgcgaggacctggatcagtggctgtccgaggacgataatcacgtggcagcaatccactgcaaggcaggcaagggcaggacaggcgtgatgatctgtgcctatctgctgcaccgcggcaagttcctgaaggcccaggaggccctggacttttacggcgaggtgaggacccgcgataagaagggcgtgacaatcccaagccagcggcggtacgtgtactattactcctacctgctgaagaaccacctggactacaggccagtggccctgctgtttcacaagatgatgttcgagacaatccctatgttctccggcggcacatgcaacccacagtttgtggtgtgccagctgaaggtgaagatctattcctctaattctggcccaacccggagagaggataagttcatgtactttgagttcccacagccactgcccgtgtgcggcgacatcaaggtggagtttttccacaagcagaacaagatgctgaagaaggataagatgtttcacttctgggtgaatacctttttcatcccaggccccgaggagacatccgagaaggtggagaatggctctctgtgcgaccaggagatcgatagcatctgttccatcgagcgggccgacaacgataaggagtacctggtgctgaccctgacaaagaatgacctggataaggccaacaaggacaaggccaatagatacttcagccccaacttcaaggtgaagctgtacttcaccaagacagtggaggagccttccaatccagaggccagctcctctaccagcgtgacacctgacgtgtccgataacgagccagaccactatcggtactccgataccacagactctgatccagagaacgagccctttgacgaggatcagcacacccagatcacaaaggtgccattcgaggatcacgtgaagctggtgaatgaggtgaccgagtttgccaagacatgcgtggccgacgagagcgccgagaactgtgataagtccctgcacaccctgttcggcgacaagctgtgcaccgtggccacactgcgggagacatatggcgagatggccgattgctgtgccaaacaggagcctgagagaaatgagtgctttctgcagcacaaggacgataacccaaatctgcctaggctggtgcggcccgaggtggacgtgatgtgcaccgcctttcacgataacgaggagacattcctgaagaagtatctgtacgagatcgcccggagacacccctatttctacgcccctgagctgctgtttttcgccaagagatacaaggccgcctttaccgagtgctgtcaggcagcagacaaggcagcatgcctgctgccaaagctggacgagctgagggatgagggcaaggccagctccgccaagcagagactgaagtgtgccagcctgcagaagtttggagagagggccttcaaggcctgggcagtggcaaggctgagccagcggttcccaaaggcagagttcgcagaggtgtccaagctggtgaccgatctgacaaaggtgcacaccgagtgctgtcacggcgacctgctggagtgcgcagacgatagggcagatctggccaagtacatctgtgagaaccaggactctatctctagcaagctgaaggagtgctgtgagaagcccctgctggagaagagccactgcatcgccgaggtggagaatgacgagatgcctgccgatctgccatctctggccgccgacttcgtggagagcaaggacgtgtgcaagaactatgccgaggccaaggacgtgtttctgggcatgttcctgtatgagtacgccaggcgccaccccgattattccgtggtgctgctgctgcggctggccaagacctacgagacaaccctggagaagtgctgtgccgccgccgacccccacgagtgctacgcaaaggtgtttgacgagttcaagccactggtggaggagccccagaacctgatcaagcagaattgtgagctgttcgagcagctgggcgagtataagtttcagaatgccctgctggtgagatacacaaagaaggtgcctcaggtgtccaccccaacactggtggaggtgtctaggaacctgggcaaggtcggcagcaagtgctgtaagcacccagaggcaaagaggatgccttgcgccgaggactatctgtctgtggtgctgaaccagctgtgcgtgctgcacgagaagacccccgtgagcgatcgggtgaccaagtgctgtacagagtctctggtgaatagacggccctgcttcagcgccctggaggtggacgagacatacgtgccaaaggagtttaacgccgagacattcaccttccacgccgacatctgtaccctgtccgagaaggagagacagatcaagaagcagacagccctggtggagctggtgaagcacaagcctaaggccaccaaggagcagctgaaggccgtgatggacgattttgccgccttcgtggagaagtgctgtaaggccgacgataaggagacatgcttcgccgaggagggcaagaagctggtcgccgcttcacaggctgctctggggctgcatcaccaccaccaccactgataagcttggatcc

SEQ ID NO: 152 - DNA, 3357 bp, synthetic construct
  source 1..3357: mol_type = other DNA
gaattcccgccgccaccatgaagtgggtgacctttattagcctgctgttcctgtttagttccgcatactcaagaggggtgtttagaagaagcgagagccctgtgaccatctccagggccggaaatgcaggagagctggtgtctcctctgctgctgccacctacacggagaaggcgccggagacacatccagggaccaggacctgtgctgaacctgccaagcgccgccgccgccccacccgtggccagagccccagaggcagcaggaggaggctccagatctgaggactatagctcctctccacacagcgccgccgccgccgcccggcccctggccgccgaggagaagcaggcccagtctctgcagcccagctcctctaggcgcagctcccactaccctgcagcagtgcagtcccaggctgccgccgagaggggagcctctgccaccgcaaagtctcgcgccatcagcatcctgcagaagaagccacgccaccagcagctgctgccctctctgtctagcttctttttcagccaccggctgcccgacatgaccgccatcatcaaggagatcgtgagcagaaataagcggcggtaccaggaggatggcttcgacctggatctgacatatatctaccccaacatcatcgccatgggatttcctgcagagcggctggagggcgtgtacagaaacaatatcgacgatgtggtgaggttcctggactccaagcacaagaaccactataagatctacaatctgtgcgccgagaggcactatgataccgccaagttcaactgtcgcgtggcccagtacccctttgaggaccacaatcctccacagctggagctgatcaagcctttctgcgaggacctggatcagtggctgtccgaggacgataatcacgtggcagcaatccactgcaaggcaggcaagggcaggacaggcgtgatgatctgtgcctatctgctgcaccgcggcaagttcctgaaggcccaggaggccctggacttttacggcgaggtgaggacccgcgataagaagggcgtgacaatcccaagccagcggcggtacgtgtactattactcctacctgctgaagaaccacctggactacaggccagtggccctgctgtttcacaagatgatgttcgagacaatccctatgttctccggcggcacatgcaacccacagtttgtggtgtgccagctgaaggtgaagatctattcctctaattctggcccaacccggagagaggataagttcatgtactttgagttcccacagccactgcccgtgtgcggcgacatcaaggtggagtttttccacaagcagaacaagatgctgaagaaggataagatgtttcacttctgggtgaatacctttttcatcccaggccccgaggagacatccgagaaggtggagaatggctctctgtgcgaccaggagatcgatagcatctgttccatcgagcgggccgacaacgataaggagtacctggtgctgaccctgacaaagaatgacctggataaggccaacaaggacaaggccaatagatacttcagccccaacttcaaggtgaagctgtacttcaccaagacagtggaggagccttccaatccagaggccagctcctctaccagcgtgacacctgacgtgtccgataacgagccagaccactatcggtactccgataccacagactctgatccagagaacgagccctttgacgaggatcagcacacccagatcacaaaggtggataagtccctgcacaccctgttcggcgacaagctgtgcaccgtggccacactgcgggagacatatggcgagatggccgattgctgtgccaaacaggagcctgagagaaatgagtgctttctgcagcacaaggacgataacccaaatctgcctaggctggtgcggcccgaggtggacgtgatgtgcaccgcctttcacgataacgaggagacattcctgaagaagtatctgtacgagatcgcccggagacacccctatttctacgcccctgagctgctgtttttcgccaagagatacaaggccgcctttaccgagtgctgtcaggcagcagacaaggcagcatgcctgctgccaaagctggacgagctgagggatgagggcaaggccagctccgccaagcagagactgaagtgtgccagcctgcagaagtttggagagagggccttcaaggcctgggcagtggcaaggctgagccagcggttcccaaaggcagagttcgcagaggtgtccaagctggtgaccgatctgacaaaggtgcacaccgagtgctgtcacggcgacctgctggagtgcgcagacgatagggcagatctggccaagtacatctgtgagaaccaggactctatctctagcaagctgaaggagtgctgtgagaagcccctgctggagaagagccactgcatcgccgaggtggagaatgacgagatgcctgccgatctgccatctctggccgccgacttcgtggagagcaaggacgtgtgcaagaactatgccgaggccaaggacgtgtttctgggcatgttcctgtatgagtacgccaggcgccaccccgattattccgtggtgctgctgctgcggctggccaagacctacgagacaaccctggagaagtgctgtgccgccgccgacccccacgagtgctacgcaaaggtgtttgacgagttcaagccactggtggaggagccccagaacctgatcaagcagaattgtgagctgttcgagcagctgggcgagtataagtttcagaatgccctgctggtgagatacacaaagaaggtgcctcaggtgtccaccccaacactggtggaggtgtctaggaacctgggcaaggtcggcagcaagtgctgtaagcacccagaggcaaagaggatgccttgcgccgaggactatctgtctgtggtgctgaaccagctgtgcgtgctgcacgagaagacccccgtgagcgatcgggtgaccaagtgctgtacagagtctctggtgaatagacggccctgcttcagcgccctggaggtggacgagacatacgtgccaaaggagtttaacgccgagacattcaccttccacgccgacatctgtaccctgtccgagaaggagagacagatcaagaagcagacagccctggtggagctggtgaagcacaagcctaaggccaccaaggagcagctgaaggccgtgatggacgattttgccgccttcgtggagaagtgctgtaaggccgacgataaggagacatgcttcgccgaggagggcaagaagctggtcgccgcttcacaggctgctctggggctgcatcaccaccaccaccactgataagcttggatcc

SEQ ID NO: 153 - DNA, 3084 bp, synthetic construct
  source 1..3084: mol_type = other DNA
gaattcccgccgccaccatgaagtgggtgacctttattagcctgctgttcctgtttagttccgcatactcaagaggggtgtttagaagaaccgccatcatcaaggagatcgtgagcagaaataagcggcggtaccaggaggatggcttcgacctggatctgacatatatctaccccaacatcatcgccatgggatttcctgcagagcggctggagggcgtgtacagaaacaatatcgacgatgtggtgaggttcctggactccaagcacaagaaccactataagatctacaatctgtgcgccgagaggcactatgataccgccaagttcaactgtcgcgtggcccagtacccctttgaggaccacaatcctccacagctggagctgatcaagcctttctgcgaggacctggatcagtggctgtccgaggacgataatcacgtggcagcaatccactgcaaggcaggcaagggcaggacaggcgtgatgatctgtgcctatctgctgcaccgcggcaagttcctgaaggcccaggaggccctggacttttacggcgaggtgaggacccgcgataagaagggcgtgacaatcccaagccagcggcggtacgtgtactattactcctacctgctgaagaaccacctggactacaggccagtggccctgctgtttcacaagatgatgttcgagacaatccctatgttctccggcggcacatgcaacccacagtttgtggtgtgccagctgaaggtgaagatctattcctctaattctggcccaacccggagagaggataagttcatgtactttgagttcccacagccactgcccgtgtgcggcgacatcaaggtggagtttttccacaagcagaacaagatgctgaagaaggataagatgtttcacttctgggtgaatacctttttcatcccaggccccgaggagacatccgagaaggtggagaatggctctctgtgcgaccaggagatcgatagcatctgttccatcgagcgggccgacaacgataaggagtacctggtgctgaccctgacaaagaatgacctggataaggccaacaaggacaaggccaatagatacttcagccccaacttcaaggtgaagctgtacttcaccaagacagtggaggagccttccaatccagaggccagctcctctaccagcgtgacacctgacgtgtccgataacgagccagaccactatcggtactccgataccacagactctgatccagagaacgagccctttgacgaggatcagcacacccagatcacaaaggtggatgcccacaagagcgaggtggcccaccgctttaaggacctgggcgaggagaacttcaaggccctggtgctgatcgcctttgcccagtacctgcagcagtgcccattcgaggatcacgtgaagctggtgaatgaggtgaccgagtttgccaagacatgcgtggccgacgagagcgccgagaactgtgataagtccctgcacaccctgttcggcgacaagctgtgcaccgtggccacactgcgggagacatatggcgagatggccgattgctgtgccaaacaggagcctgagagaaatgagtgctttctgcagcacaaggacgataacccaaatctgcctaggctggtgcggcccgaggtggacgtgatgtgcaccgcctttcacgataacgaggagacattcctgaagaagtatctgtacgagatcgcccggagacacccctatttctacgcccctgagctgctgtttttcgccaagagatacaaggccgcctttaccgagtgctgtcaggcagcagacaaggcagcatgcctgctgccaaagctggacgagctgagggatgagggcaaggccagctccgccaagcagagactgaagtgtgccagcctgcagaagtttggagagagggccttcaaggcctgggcagtggcaaggctgagccagcggttcccaaaggcagagttcgcagaggtgtccaagctggtgaccgatctgacaaaggtgcacaccgagtgctgtcacggcgacctgctggagtgcgcagacgatagggcagatctggccaagtacatctgtgagaaccaggactctatctctagcaagctgaaggagtgctgtgagaagcccctgctggagaagagccactgcatcgccgaggtggagaatgacgagatgcctgccgatctgccatctctggccgccgacttcgtggagagcaaggacgtgtgcaagaactatgccgaggccaaggacgtgtttctgggcatgttcctgtatgagtacgccaggcgccaccccgattattccgtggtgctgctgctgcggctggccaagacctacgagacaaccctggagaagtgctgtgccgccgccgacccccacgagtgctacgcaaaggtgtttgacgagttcaagccactggtggaggagccccagaacctgatcaagcagaattgtgagctgttcgagcagctgggcgagtataagtttcagaatgccctgctggtgagatacacaaagaaggtgcctcaggtgtccaccccaacactggtggaggtgtctaggaacctgggcaaggtcggcagcaagtgctgtaagcacccagaggcaaagaggatgccttgcgccgaggactatctgtctgtggtgctgaaccagctgtgcgtgctgcacgagaagacccccgtgagcgatcgggtgaccaagtgctgtacagagtctctggtgaatagacggccctgcttcagcgccctggaggtggacgagacatacgtgccaaaggagtttaacgccgagacattcaccttccacgccgacatctgtaccctgtccgagaaggagagacagatcaagaagcagacagccctggtggagctggtgaagcacaagcctaaggccaccaaggagcagctgaaggccgtgatggacgattttgccgccttcgtggagaagtgctgtaaggccgacgataaggagacatgcttcgccgaggagggcaagaagctggtcgccgcttcacaggctgctctggggctgcatcaccaccaccaccactgataagcttggatcc

SEQ ID NO: 154 - DNA, 3081 bp, synthetic construct
  source 1..3081: mol_type = other DNA
gaattcccgccgccaccatgaaatgggtcaccttcctcctcctgctgttcgtgtctggttccgcctttagccggggggtcttccgacgggaggctcacaagtccgagatcgcccacaggttcaaggacctgggagagcagcacttcaagggcctggtgctgatcgccttttctcagtacctgcagaagtgcccctacgaggagcacatcaagctggtgcaggaggtgaccgatttcgctaagacatgcgtggctgacgagaacgccgagaactgtgataagagcatccacacactgtttggagacaagctgtgcgccatccccaagctgagggacaactacggcgagctggctgattgctgtgccaagcaggagcctgagagaaacgagtgcttcctgcagcacaaggacgataaccccaacctgccaccttttcagcggcctgaggctgaggctatgtgcacctcttttcaggagaaccctacaagcttcctgggacactacctgcacgaggtggctcggcgccacccttacttctacgctccagagctgctgtactacgctgagaagtacaacgaggtgctgacccagtgctgtacagagagcgacaaggctgcctgcctgacccccaagctggatgctgtgaaggagaaggccctggtggctgccgtgcggcagcgcatgaagtgttctagcatgcagaggtttggagagagagccttcaaggcttgggctgtggctaggatgtcccagaggttccctaacgctgagttcgccgagatcaccaagctggccaccgacgtgacaaagatcaacaaggagtgctgtcacggcgatctgctggagtgcgctgacgatagagctgagctggccaagtacatgtgcgagaaccaggccacaatctcctctaagctgcaggcttgctgtgacaagccagtgctgcagaagagccagtgcctggccgagatcgagcacgacaacatcccagctgatctgccctccatcgctgccgacttcgtggaggataaggaggtgtgcaagaactacgctgaggccaaggacgtgttcctgggcaccttcctgtacgagtacagcaggagacaccccgactatagcgtgtccctgctgctgaggctggctaagaagtacgaggccaccctggagaagtgctgtgctgagggcgaccccccagcttgctacggaacagtgctggctgagttccagccactggtggaggagcctaagaacctggtgaagaccaactgtgagctgtacgagaagctgggagagtacggctttcagaacgccgtgctggtgagatacacacagaaggctccacaggtgtccacccccacactggtggaggctgccaggaacctgggaagagtgggcaccaagtgctgtacactgcctgaggctcagcggctgccatgcgtggaggattacctgtctgctatcctgaaccgcctgtgcgtgctgcacgagaagacccccgtgagcgagaaggtgacaaagtgctgttctggaagcctggtggagcggcgcccatgcttctccgccctgaccgtggacgagacatacgtgcccaaggagtttaaggctgagacattcaccttccactctgacatctgtaccctgccagataaggagaagcagatcaagaagcagacagctctggccgagctggtgaagcacaagcccaaggccaccgaggaccagctgaagacagtgatgggcgactttgctcagttcgtggataagtgctgtaaggctgccgacaaggataactgtttcgccaccgaaggtccaaatctcgtcgcccgctccaaagaagcactggctaccgccatcatcaaggagatcgtgagcagaaacaagaggagataccaggaggacggcttcgacctggatctgacatacatctaccctaacatcatcgctatgggatttccagctgagcggctggagggcgtgtacaggaacaacatcgacgatgtggtgcggttcctggactccaagcacaagaaccactacaagatctacaacctgtgcgctgagaggcactacgacaccgccaagttcaactgtagagtggctcagtacccttttgaggatcacaaccctccacagctggagctgatcaagccattctgcgaggacctggatcagtggctgagcgaggacgataaccacgtggctgccatccactgcaaggccggaaagggccggacaggagtgatgatctgtgcttacctgctgcaccgcggcaagttcctgaaggctcaggaggccctggacttttacggagaggtgaggaccagagataagaagggcgtgacaatcccttcccagcggcgctacgtgtactactactcttacctgctgaagaaccacctggactaccgcccagtggccctgctgtttcacaagatgatgttcgagacaatcccaatgttctctggaggcacatgcaacccccagtttgtggtgtgccagctgaaggtgaagatctacagctccaacagcggaccaaccaggagagaggacaagttcatgtactttgagttcccacagcctctgcccgtgtgcggcgatatcaaggtggagtttttccacaagcagaacaagatgctgaagaaggacaagatgtttcacttctgggtcaacacctttttcatccccggacctgaggagacaagcgagaaggtggagaacggctccctgtgcgaccaggagatcgattctatctgtagcatcgagcgggccgacaacgataaggagtacctggtgctgaccctgacaaagaacgacctggataaggctaacaaggataaggccaaccgctacttttcccccaacttcaaggtgaagctgtacttcaccaagacagtggaggagccttctaacccagaggcctctagctccacctctgtgacaccagacgtgagcgataacgagcccgaccactacaggtacagcgataccacagactccgatcccgagaacgagccttttgacgaggatcagcacagccagatcaccaaggtgcatcatcaccatcatcattgataagcttggatcc

SEQ ID NO: 155 - DNA, 2472 bp, synthetic construct
  source 1..2472: mol_type = other DNA
gaattcccgccgccaccatgaaatgggtcaccttcctcctcctgctgttcgtgtctggttccgcctttagccggggggtcttccgacgggaggctcacaagtccgagatcgcccacaggttcaaggacctgggagagcagcacttcaagggcctggtgctgatcgccttttctcagtacctgcagaagtgcccctacgaggagcacatcaagctggtgcaggaggtgaccgatttcgctaagacatgcgtggctgacgagaacgccgagaactgtgataagagcatccacacactgtttggagacaagctgtgcgccatccccaagctgagggacaactacggcgagctggctgattgctgtgccaagcaggagcctgagagaaacgagtgcttcctgcagcacaaggacgataaccccaacctgccaccttttcagcggcctgaggctgaggctatgtgcacctcttttcaggagaaccctacaagcttcctgggacactacctgcacgaggtggctcggcgccacccttacttctacgctccagagctgctgtactacgctgagaagtacaacgaggtgctgacccagtgctgtacagagagcgacaaggctgcctgcctgacccccaagctggatgctgtgaaggagaaggccctggtggctgccgtgcggcagcgcatgaagtgttctagcatgcagaggtttggagagagagccttcaaggcttgggctgtggctaggatgtcccagaggttccctaacgctgagttcgccgagatcaccaagctggccaccgacgtgacaaagatcaacaaggagtgctgtcacggcgatctgctggagtgcgctgacgatagagctgagctggccaagtacatgtgcgagaaccaggccacaatctcctctaagctgcaggcttgctgtgacaagccagtgctgcagaagagccagtgcctggccgagatcgagcacgacaacatcccagctgatctgccctccatcgctgccgacttcgtggaggataaggaggtgtgcaagaactacgctgaggccaaggacgtgttcctgggcaccttcctgtacgagtacagcaggagacaccccgactatagcgtgtccctgctgctgaggctggctaagaagtacgaggccaccctggagaagtgctgtgctgagggcgaccccccagcttgctacggaacagtgctggctgagttccagccactggtgaccgccatcatcaaggagatcgtgagcagaaacaagaggagataccaggaggacggcttcgacctggatctgacatacatctaccctaacatcatcgctatgggatttccagctgagcggctggagggcgtgtacaggaacaacatcgacgatgtggtgcggttcctggactccaagcacaagaaccactacaagatctacaacctgtgcgctgagaggcactacgacaccgccaagttcaactgtagagtggctcagtacccttttgaggatcacaaccctccacagctggagctgatcaagccattctgcgaggacctggatcagtggctgagcgaggacgataaccacgtggctgccatccactgcaaggccggaaagggccggacaggagtgatgatctgtgcttacctgctgcaccgcggcaagttcctgaaggctcaggaggccctggacttttacggagaggtgaggaccagagataagaagggcgtgacaatcccttcccagcggcgctacgtgtactactactcttacctgctgaagaaccacctggactaccgcccagtggccctgctgtttcacaagatgatgttcgagacaatcccaatgttctctggaggcacatgcaacccccagtttgtggtgtgccagctgaaggtgaagatctacagctccaacagcggaccaaccaggagagaggacaagttcatgtactttgagttcccacagcctctgcccgtgtgcggcgatatcaaggtggagtttttccacaagcagaacaagatgctgaagaaggacaagatgtttcacttctgggtcaacacctttttcatccccggacctgaggagacaagcgagaaggtggagaacggctccctgtgcgaccaggagatcgattctatctgtagcatcgagcgggccgacaacgataaggagtacctggtgctgaccctgacaaagaacgacctggataaggctaacaaggataaggccaaccgctacttttcccccaacttcaaggtgaagctgtacttcaccaagacagtggaggagccttctaacccagaggcctctagctccacctctgtgacaccagacgtgagcgataacgagcccgaccactacaggtacagcgataccacagactccgatcccgagaacgagccttttgacgaggatcagcacagccagatcaccaaggtgcatcatcaccatcatcattgataagcttggatcc

SEQ ID NO: 156 - DNA, 3081 bp, synthetic construct
  source 1..3081: mol_type = other DNA
gaattcccgccgccaccatgaaatgggtcaccttcctcctcctgctgttcgtgtctggttccgcctttagccggggggtcttccgacgggaggctcacaaaagcgagattgcccatagatacaacgacctgggggaacagcatttcaagggactggtcctgattgcattttcacagtacctgcagaagtgcagctatgacgagcacgccaagctggtgcaggaggtgaccgatttcgccaagacatgcgtggcagacgagtccgccgcaaactgtgataagtctctgcacaccctgtttggcgacaagctgtgcgccatccccaacctgcgggagaattatggcgagctggccgattgctgtacaaagcaggagcctgagcgcaacgagtgcttcctgcagcacaaggacgataatccaagcctgccaccttttgagcggcccgaggcagaggcaatgtgcacctccttcaaggagaacccaaccaccttcatgggccactacctgcacgaggtggccaggagacacccctacttctatgcccctgagctgctgtactatgccgagcagtataatgagatcctgacccagtgctgtgccgaggccgacaaggagagctgcctgacacctaagctggatggcgtgaaggagaaggccctggtgagctccgtgcggcagcgcatgaagtgttctagcatgcagaagttcggcgagagggcctttaaggcatgggcagtggcaaggctgtcccagaccttcccaaacgccgactttgccgagatcacaaagctggccaccgatctgacaaaagtgaataaggagtgctgtcacggcgacctgctggagtgcgcagacgatagggcagagctggccaagtatatgtgcgagaaccaggccaccatctcctctaagctgcagacatgctgtgataagcccctgctgaagaaggcccactgcctgtctgaggtggagcacgacaccatgcctgcagatctgccagcaatcgcagcagacttcgtggaggatcaggaggtgtgcaagaactacgccgaggccaaggacgtgttcctgggcacctttctgtacgagtattcccggcgccaccctgattacagcgtgtccctgctgctgaggctggccaagaagtatgaggccaccctggagaagtgctgtgcagaggcaaatccaccagcatgctacggaacagtgctggcagagttccagccactggtggaggagcccaagaacctggtgaagaccaattgtgacctgtacgagaagctgggcgagtatggctttcagaacgccatcctggtgagatatacacagaaggcccctcaggtgtccaccccaacactggtggaggccgccaggaatctgggcagagtgggcaccaagtgctgtacactgcccgaggaccagaggctgccttgcgtggaggattacctgtctgccatcctgaatagggtgtgcctgctgcacgagaagacccctgtgagcgagcacgtgacaaagtgctgttctggcagcctggtggagaggaggccctgcttctccgccctgaccgtggacgagacatacgtgccaaaggagtttaaggccgagactttcacgtttcactctgatatctgtaccctgccagagaaggagaagcagatcaagaagcagacagccctggccgagctggtgaagcacaagcccaaggccaccgccgagcagctgaagacagtgatggacgatttcgcccagtttctggacacctgctgtaaggccgccgataaggacacctgtttctccactgaggggcctaatctggtcacacgctgtaaagacgcactggcaaccgccatcatcaaggagatcgtgagcagaaacaagaggagataccaggaggacggcttcgacctggatctgacatacatctaccctaacatcatcgctatgggatttccagctgagcggctggagggcgtgtacaggaacaacatcgacgatgtggtgcggttcctggactccaagcacaagaaccactacaagatctacaacctgtgcgctgagaggcactacgacaccgccaagttcaactgtagagtggctcagtacccttttgaggatcacaaccctccacagctggagctgatcaagccattctgcgaggacctggatcagtggctgagcgaggacgataaccacgtggctgccatccactgcaaggccggaaagggccggacaggagtgatgatctgtgcttacctgctgcaccgcggcaagttcctgaaggctcaggaggccctggacttttacggagaggtgaggaccagagataagaagggcgtgacaatcccttcccagcggcgctacgtgtactactactcttacctgctgaagaaccacctggactaccgcccagtggccctgctgtttcacaagatgatgttcgagacaatcccaatgttctctggaggcacatgcaacccccagtttgtggtgtgccagctgaaggtgaagatctacagctccaacagcggaccaaccaggagagaggacaagttcatgtactttgagttcccacagcctctgcccgtgtgcggcgatatcaaggtggagtttttccacaagcagaacaagatgctgaagaaggacaagatgtttcacttctgggtcaacacctttttcatccccggacctgaggagacaagcgagaaggtggagaacggctccctgtgcgaccaggagatcgattctatctgtagcatcgagcgggccgacaacgataaggagtacctggtgctgaccctgacaaagaacgacctggataaggctaacaaggataaggccaaccgctacttttcccccaacttcaaggtgaagctgtacttcaccaagacagtggaggagccttctaacccagaggcctctagctccacctctgtgacaccagacgtgagcgataacgagcccgaccactacaggtacagcgataccacagactccgatcccgagaacgagccttttgacgaggatcagcacagccagatcaccaaggtgcatcatcaccatcatcattgataagcttggatcc

SEQ ID NO: 157 - DNA, 3567 bp, synthetic construct
  source 1..3567: mol_type = other DNA
gaattcccgccgccaccatgaagtgggtgacctttattagcctgctgttcctgtttagttccgcatactcaagaggggtgtttagaagaagcgagagccctgtgaccatctccagggccggaaatgcaggagagctggtgtctcctctgctgctgccacctacacggagaaggcgccggagacacatccagggaccaggacctgtgctgaacctgccaagcgccgccgccgccccacccgtggccagagccccagaggcagcaggaggaggctccagatctgaggactatagctcctctccacacagcgccgccgccgccgcccggcccctggccgccgaggagaagcaggcccagtctctgcagcccagctcctctaggcgcagctcccactaccctgcagcagtgcagtcccaggctgccgccgagaggggagcctctgccaccgcaaagtctcgcgccatcagcatcctgcagaagaagccacgccaccagcagctgctgccctctctgtctagcttctttttcagccaccggctgcccgacatgaccgccatcatcaaggagatcgtgagcagaaataagcggcggtaccaggaggatggcttcgacctggatctgacatatatctaccccaacatcatcgccatgggatttcctgcagagcggctggagggcgtgtacagaaacaatatcgacgatgtggtgaggttcctggactccaagcacaagaaccactataagatctacaatctgtgcgccgagaggcactatgataccgccaagttcaactgtcgcgtggcccagtacccctttgaggaccacaatcctccacagctggagctgatcaagcctttctgcgaggacctggatcagtggctgtccgaggacgataatcacgtggcagcaatccactgcaaggcaggcaagggcaggacaggcgtgatgatctgtgcctatctgctgcaccgcggcaagttcctgaaggcccaggaggccctggacttttacggcgaggtgaggacccgcgataagaagggcgtgacaatcccaagccagcggcggtacgtgtactattactcctacctgctgaagaaccacctggactacaggccagtggccctgctgtttcacaagatgatgttcgagacaatccctatgttctccggcggcacatgcaacccacagtttgtggtgtgccagctgaaggtgaagatctattcctctaattctggcccaacccggagagaggataagttcatgtactttgagttcccacagccactgcccgtgtgcggcgacatcaaggtggagtttttccacaagcagaacaagatgctgaagaaggataagatgtttcacttctgggtgaatacctttttcatcccaggccccgaggagacatccgagaaggtggagaatggctctctgtgcgaccaggagatcgatagcatctgttccatcgagcgggccgacaacgataaggagtacctggtgctgaccctgacaaagaatgacctggataaggccaacaaggacaaggccaatagatacttcagccccaacttcaaggtgaagctgtacttcaccaagacagtggaggagccttccaatccagaggccagctcctctaccagcgtgacacctgacgtgtccgataacgagccagaccactatcggtactccgataccacagactctgatccagagaacgagccctttgacgaggatcagcacacccagatcacaaaggtgggccccgccgccctgaaggcagccgatgcccacaagagcgaggtggcccaccgctttaaggacctgggcgaggagaacttcaaggccctggtgctgatcgcctttgcccagtacctgcagcagtgcccattcgaggatcacgtgaagctggtgaatgaggtgaccgagtttgccaagacatgcgtggccgacgagagcgccgagaactgtgataagtccctgcacaccctgttcggcgacaagctgtgcaccgtggccacactgcgggagacatatggcgagatggccgattgctgtgccaaacaggagcctgagagaaatgagtgctttctgcagcacaaggacgataacccaaatctgcctaggctggtgcggcccgaggtggacgtgatgtgcaccgcctttcacgataacgaggagacattcctgaagaagtatctgtacgagatcgcccggagacacccctatttctacgcccctgagctgctgtttttcgccaagagatacaaggccgcctttaccgagtgctgtcaggcagcagacaaggcagcatgcctgctgccaaagctggacgagctgagggatgagggcaaggccagctccgccaagcagagactgaagtgtgccagcctgcagaagtttggagagagggccttcaaggcctgggcagtggcaaggctgagccagcggttcccaaaggcagagttcgcagaggtgtccaagctggtgaccgatctgacaaaggtgcacaccgagtgctgtcacggcgacctgctggagtgcgcagacgatagggcagatctggccaagtacatctgtgagaaccaggactctatctctagcaagctgaaggagtgctgtgagaagcccctgctggagaagagccactgcatcgccgaggtggagaatgacgagatgcctgccgatctgccatctctggccgccgacttcgtggagagcaaggacgtgtgcaagaactatgccgaggccaaggacgtgtttctgggcatgttcctgtatgagtacgccaggcgccaccccgattattccgtggtgctgctgctgcggctggccaagacctacgagacaaccctggagaagtgctgtgccgccgccgacccccacgagtgctacgcaaaggtgtttgacgagttcaagccactggtggaggagccccagaacctgatcaagcagaattgtgagctgttcgagcagctgggcgagtataagtttcagaatgccctgctggtgagatacacaaagaaggtgcctcaggtgtccaccccaacactggtggaggtgtctaggaacctgggcaaggtcggcagcaagtgctgtaagcacccagaggcaaagaggatgccttgcgccgaggactatctgtctgtggtgctgaaccagctgtgcgtgctgcacgagaagacccccgtgagcgatcgggtgaccaagtgctgtacagagtctctggtgaatagacggccctgcttcagcgccctggaggtggacgagacatacgtgccaaaggagtttaacgccgagacattcaccttccacgccgacatctgtaccctgtccgagaaggagagacagatcaagaagcagacagccctggtggagctggtgaagcacaagcctaaggccaccaaggagcagctgaaggccgtgatggacgattttgccgccttcgtggagaagtgctgtaaggccgacgataaggagacatgcttcgccgaggagggcaagaagctggtcgccgcttcacaggctgctctggggctgcatcaccaccaccaccactgataagcttggatcc

SEQ ID NO: 158 - DNA, 3558 bp, synthetic construct
  source 1..3558: mol_type = other DNA
gaattcccgccgccaccatgaagtgggtgacctttattagcctgctgttcctgtttagttccgcatactcaagaggggtgtttagaagaagcgagagccctgtgaccatctccagggccggaaatgcaggagagctggtgtctcctctgctgctgccacctacacggagaaggcgccggagacacatccagggaccaggacctgtgctgaacctgccaagcgccgccgccgccccacccgtggccagagccccagaggcagcaggaggaggctccagatctgaggactatagctcctctccacacagcgccgccgccgccgcccggcccctggccgccgaggagaagcaggcccagtctctgcagcccagctcctctaggcgcagctcccactaccctgcagcagtgcagtcccaggctgccgccgagaggggagcctctgccaccgcaaagtctcgcgccatcagcatcctgcagaagaagccacgccaccagcagctgctgccctctctgtctagcttctttttcagccaccggctgcccgacatgaccgccatcatcaaggagatcgtgagcagaaataagcggcggtaccaggaggatggcttcgacctggatctgacatatatctaccccaacatcatcgccatgggatttcctgcagagcggctggagggcgtgtacagaaacaatatcgacgatgtggtgaggttcctggactccaagcacaagaaccactataagatctacaatctgtgcgccgagaggcactatgataccgccaagttcaactgtcgcgtggcccagtacccctttgaggaccacaatcctccacagctggagctgatcaagcctttctgcgaggacctggatcagtggctgtccgaggacgataatcacgtggcagcaatccactgcaaggcaggcaagggcaggacaggcgtgatgatctgtgcctatctgctgcaccgcggcaagttcctgaaggcccaggaggccctggacttttacggcgaggtgaggacccgcgataagaagggcgtgacaatcccaagccagcggcggtacgtgtactattactcctacctgctgaagaaccacctggactacaggccagtggccctgctgtttcacaagatgatgttcgagacaatccctatgttctccggcggcacatgcaacccacagtttgtggtgtgccagctgaaggtgaagatctattcctctaattctggcccaacccggagagaggataagttcatgtactttgagttcccacagccactgcccgtgtgcggcgacatcaaggtggagtttttccacaagcagaacaagatgctgaagaaggataagatgtttcacttctgggtgaatacctttttcatcccaggccccgaggagacatccgagaaggtggagaatggctctctgtgcgaccaggagatcgatagcatctgttccatcgagcgggccgacaacgataaggagtacctggtgctgaccctgacaaagaatgacctggataaggccaacaaggacaaggccaatagatacttcagccccaacttcaaggtgaagctgtacttcaccaagacagtggaggagccttccaatccagaggccagctcctctaccagcgtgacacctgacgtgtccgataacgagccagaccactatcggtactccgataccacagactctgatccagagaacgagccctttgacgaggatcagcacacccagatcacaaaggtgggcggagctggctccgatgcccacaagagcgaggtggcccaccgctttaaggacctgggcgaggagaacttcaaggccctggtgctgatcgcctttgcccagtacctgcagcagtgcccattcgaggatcacgtgaagctggtgaatgaggtgaccgagtttgccaagacatgcgtggccgacgagagcgccgagaactgtgataagtccctgcacaccctgttcggcgacaagctgtgcaccgtggccacactgcgggagacatatggcgagatggccgattgctgtgccaaacaggagcctgagagaaatgagtgctttctgcagcacaaggacgataacccaaatctgcctaggctggtgcggcccgaggtggacgtgatgtgcaccgcctttcacgataacgaggagacattcctgaagaagtatctgtacgagatcgcccggagacacccctatttctacgcccctgagctgctgtttttcgccaagagatacaaggccgcctttaccgagtgctgtcaggcagcagacaaggcagcatgcctgctgccaaagctggacgagctgagggatgagggcaaggccagctccgccaagcagagactgaagtgtgccagcctgcagaagtttggagagagggccttcaaggcctgggcagtggcaaggctgagccagcggttcccaaaggcagagttcgcagaggtgtccaagctggtgaccgatctgacaaaggtgcacaccgagtgctgtcacggcgacctgctggagtgcgcagacgatagggcagatctggccaagtacatctgtgagaaccaggactctatctctagcaagctgaaggagtgctgtgagaagcccctgctggagaagagccactgcatcgccgaggtggagaatgacgagatgcctgccgatctgccatctctggccgccgacttcgtggagagcaaggacgtgtgcaagaactatgccgaggccaaggacgtgtttctgggcatgttcctgtatgagtacgccaggcgccaccccgattattccgtggtgctgctgctgcggctggccaagacctacgagacaaccctggagaagtgctgtgccgccgccgacccccacgagtgctacgcaaaggtgtttgacgagttcaagccactggtggaggagccccagaacctgatcaagcagaattgtgagctgttcgagcagctgggcgagtataagtttcagaatgccctgctggtgagatacacaaagaaggtgcctcaggtgtccaccccaacactggtggaggtgtctaggaacctgggcaaggtcggcagcaagtgctgtaagcacccagaggcaaagaggatgccttgcgccgaggactatctgtctgtggtgctgaaccagctgtgcgtgctgcacgagaagacccccgtgagcgatcgggtgaccaagtgctgtacagagtctctggtgaatagacggccctgcttcagcgccctggaggtggacgagacatacgtgccaaaggagtttaacgccgagacattcaccttccacgccgacatctgtaccctgtccgagaaggagagacagatcaagaagcagacagccctggtggagctggtgaagcacaagcctaaggccaccaaggagcagctgaaggccgtgatggacgattttgccgccttcgtggagaagtgctgtaaggccgacgataaggagacatgcttcgccgaggagggcaagaagctggtcgccgcttcacaggctgctctggggctgcatcaccaccaccaccactgataagcttggatcc

SEQ ID NO: 159 - DNA, 3555 bp, synthetic construct
  source 1..3555: mol_type = other DNA
gaattcccgccgccaccatgaagtgggtgacctttattagcctgctgttcctgtttagttccgcatactcaagaggggtgtttagaagaagcgagagccctgtgaccatctccagggccggaaatgcaggagagctggtgtctcctctgctgctgccacctacacggagaaggcgccggagacacatccagggaccaggacctgtgctgaacctgccaagcgccgccgccgccccacccgtggccagagccccagaggcagcaggaggaggctccagatctgaggactatagctcctctccacacagcgccgccgccgccgcccggcccctggccgccgaggagaagcaggcccagtctctgcagcccagctcctctaggcgcagctcccactaccctgcagcagtgcagtcccaggctgccgccgagaggggagcctctgccaccgcaaagtctcgcgccatcagcatcctgcagaagaagccacgccaccagcagctgctgccctctctgtctagcttctttttcagccaccggctgcccgacatgaccgccatcatcaaggagatcgtgagcagaaataagcggcggtaccaggaggatggcttcgacctggatctgacatatatctaccccaacatcatcgccatgggatttcctgcagagcggctggagggcgtgtacagaaacaatatcgacgatgtggtgaggttcctggactccaagcacaagaaccactataagatctacaatctgtgcgccgagaggcactatgataccgccaagttcaactgtcgcgtggcccagtacccctttgaggaccacaatcctccacagctggagctgatcaagcctttctgcgaggacctggatcagtggctgtccgaggacgataatcacgtggcagcaatccactgcaaggcaggcaagggcaggacaggcgtgatgatctgtgcctatctgctgcaccgcggcaagttcctgaaggcccaggaggccctggacttttacggcgaggtgaggacccgcgataagaagggcgtgacaatcccaagccagcggcggtacgtgtactattactcctacctgctgaagaaccacctggactacaggccagtggccctgctgtttcacaagatgatgttcgagacaatccctatgttctccggcggcacatgcaacccacagtttgtggtgtgccagctgaaggtgaagatctattcctctaattctggcccaacccggagagaggataagttcatgtactttgagttcccacagccactgcccgtgtgcggcgacatcaaggtggagtttttccacaagcagaacaagatgctgaagaaggataagatgtttcacttctgggtgaatacctttttcatcccaggccccgaggagacatccgagaaggtggagaatggctctctgtgcgaccaggagatcgatagcatctgttccatcgagcgggccgacaacgataaggagtacctggtgctgaccctgacaaagaatgacctggataaggccaacaaggacaaggccaatagatacttcagccccaacttcaaggtgaagctgtacttcaccaagacagtggaggagccttccaatccagaggccagctcctctaccagcgtgacacctgacgtgtccgataacgagccagaccactatcggtactccgataccacagactctgatccagagaacgagccctttgacgaggatcagcacacccagatcacaaaggtgggcttcgtgggcgatgcccacaagagcgaggtggcccaccgctttaaggacctgggcgaggagaacttcaaggccctggtgctgatcgcctttgcccagtacctgcagcagtgcccattcgaggatcacgtgaagctggtgaatgaggtgaccgagtttgccaagacatgcgtggccgacgagagcgccgagaactgtgataagtccctgcacaccctgttcggcgacaagctgtgcaccgtggccacactgcgggagacatatggcgagatggccgattgctgtgccaaacaggagcctgagagaaatgagtgctttctgcagcacaaggacgataacccaaatctgcctaggctggtgcggcccgaggtggacgtgatgtgcaccgcctttcacgataacgaggagacattcctgaagaagtatctgtacgagatcgcccggagacacccctatttctacgcccctgagctgctgtttttcgccaagagatacaaggccgcctttaccgagtgctgtcaggcagcagacaaggcagcatgcctgctgccaaagctggacgagctgagggatgagggcaaggccagctccgccaagcagagactgaagtgtgccagcctgcagaagtttggagagagggccttcaaggcctgggcagtggcaaggctgagccagcggttcccaaaggcagagttcgcagaggtgtccaagctggtgaccgatctgacaaaggtgcacaccgagtgctgtcacggcgacctgctggagtgcgcagacgatagggcagatctggccaagtacatctgtgagaaccaggactctatctctagcaagctgaaggagtgctgtgagaagcccctgctggagaagagccactgcatcgccgaggtggagaatgacgagatgcctgccgatctgccatctctggccgccgacttcgtggagagcaaggacgtgtgcaagaactatgccgaggccaaggacgtgtttctgggcatgttcctgtatgagtacgccaggcgccaccccgattattccgtggtgctgctgctgcggctggccaagacctacgagacaaccctggagaagtgctgtgccgccgccgacccccacgagtgctacgcaaaggtgtttgacgagttcaagccactggtggaggagccccagaacctgatcaagcagaattgtgagctgttcgagcagctgggcgagtataagtttcagaatgccctgctggtgagatacacaaagaaggtgcctcaggtgtccaccccaacactggtggaggtgtctaggaacctgggcaaggtcggcagcaagtgctgtaagcacccagaggcaaagaggatgccttgcgccgaggactatctgtctgtggtgctgaaccagctgtgcgtgctgcacgagaagacccccgtgagcgatcgggtgaccaagtgctgtacagagtctctggtgaatagacggccctgcttcagcgccctggaggtggacgagacatacgtgccaaaggagtttaacgccgagacattcaccttccacgccgacatctgtaccctgtccgagaaggagagacagatcaagaagcagacagccctggtggagctggtgaagcacaagcctaaggccaccaaggagcagctgaaggccgtgatggacgattttgccgccttcgtggagaagtgctgtaaggccgacgataaggagacatgcttcgccgaggagggcaagaagctggtcgccgcttcacaggctgctctggggctgcatcaccaccaccaccactgataagcttggatcc

SEQ ID NO: 160 - DNA, 3558 bp, synthetic construct
  source 1..3558: mol_type = other DNA
gaattcccgccgccaccatgaagtgggtgacctttattagcctgctgttcctgtttagttccgcatactcaagaggggtgtttagaagaagcgagagccctgtgaccatctccagggccggaaatgcaggagagctggtgtctcctctgctgctgccacctacacggagaaggcgccggagacacatccagggaccaggacctgtgctgaacctgccaagcgccgccgccgccccacccgtggccagagccccagaggcagcaggaggaggctccagatctgaggactatagctcctctccacacagcgccgccgccgccgcccggcccctggccgccgaggagaagcaggcccagtctctgcagcccagctcctctaggcgcagctcccactaccctgcagcagtgcagtcccaggctgccgccgagaggggagcctctgccaccgcaaagtctcgcgccatcagcatcctgcagaagaagccacgccaccagcagctgctgccctctctgtctagcttctttttcagccaccggctgcccgacatgaccgccatcatcaaggagatcgtgagcagaaataagcggcggtaccaggaggatggcttcgacctggatctgacatatatctaccccaacatcatcgccatgggatttcctgcagagcggctggagggcgtgtacagaaacaatatcgacgatgtggtgaggttcctggactccaagcacaagaaccactataagatctacaatctgtgcgccgagaggcactatgataccgccaagttcaactgtcgcgtggcccagtacccctttgaggaccacaatcctccacagctggagctgatcaagcctttctgcgaggacctggatcagtggctgtccgaggacgataatcacgtggcagcaatccactgcaaggcaggcaagggcaggacaggcgtgatgatctgtgcctatctgctgcaccgcggcaagttcctgaaggcccaggaggccctggacttttacggcgaggtgaggacccgcgataagaagggcgtgacaatcccaagccagcggcggtacgtgtactattactcctacctgctgaagaaccacctggactacaggccagtggccctgctgtttcacaagatgatgttcgagacaatccctatgttctccggcggcacatgcaacccacagtttgtggtgtgccagctgaaggtgaagatctattcctctaattctggcccaacccggagagaggataagttcatgtactttgagttcccacagccactgcccgtgtgcggcgacatcaaggtggagtttttccacaagcagaacaagatgctgaagaaggataagatgtttcacttctgggtgaatacctttttcatcccaggccccgaggagacatccgagaaggtggagaatggctctctgtgcgaccaggagatcgatagcatctgttccatcgagcgggccgacaacgataaggagtacctggtgctgaccctgacaaagaatgacctggataaggccaacaaggacaaggccaatagatacttcagccccaacttcaaggtgaagctgtacttcaccaagacagtggaggagccttccaatccagaggccagctcctctaccagcgtgacacctgacgtgtccgataacgagccagaccactatcggtactccgataccacagactctgatccagagaacgagccctttgacgaggatcagcacacccagatcacaaaggtgttcggcttcgtgggcgatgcccacaagagcgaggtggcccaccgctttaaggacctgggcgaggagaacttcaaggccctggtgctgatcgcctttgcccagtacctgcagcagtgcccattcgaggatcacgtgaagctggtgaatgaggtgaccgagtttgccaagacatgcgtggccgacgagagcgccgagaactgtgataagtccctgcacaccctgttcggcgacaagctgtgcaccgtggccacactgcgggagacatatggcgagatggccgattgctgtgccaaacaggagcctgagagaaatgagtgctttctgcagcacaaggacgataacccaaatctgcctaggctggtgcggcccgaggtggacgtgatgtgcaccgcctttcacgataacgaggagacattcctgaagaagtatctgtacgagatcgcccggagacacccctatttctacgcccctgagctgctgtttttcgccaagagatacaaggccgcctttaccgagtgctgtcaggcagcagacaaggcagcatgcctgctgccaaagctggacgagctgagggatgagggcaaggccagctccgccaagcagagactgaagtgtgccagcctgcagaagtttggagagagggccttcaaggcctgggcagtggcaaggctgagccagcggttcccaaaggcagagttcgcagaggtgtccaagctggtgaccgatctgacaaaggtgcacaccgagtgctgtcacggcgacctgctggagtgcgcagacgatagggcagatctggccaagtacatctgtgagaaccaggactctatctctagcaagctgaaggagtgctgtgagaagcccctgctggagaagagccactgcatcgccgaggtggagaatgacgagatgcctgccgatctgccatctctggccgccgacttcgtggagagcaaggacgtgtgcaagaactatgccgaggccaaggacgtgtttctgggcatgttcctgtatgagtacgccaggcgccaccccgattattccgtggtgctgctgctgcggctggccaagacctacgagacaaccctggagaagtgctgtgccgccgccgacccccacgagtgctacgcaaaggtgtttgacgagttcaagccactggtggaggagccccagaacctgatcaagcagaattgtgagctgttcgagcagctgggcgagtataagtttcagaatgccctgctggtgagatacacaaagaaggtgcctcaggtgtccaccccaacactggtggaggtgtctaggaacctgggcaaggtcggcagcaagtgctgtaagcacccagaggcaaagaggatgccttgcgccgaggactatctgtctgtggtgctgaaccagctgtgcgtgctgcacgagaagacccccgtgagcgatcgggtgaccaagtgctgtacagagtctctggtgaatagacggccctgcttcagcgccctggaggtggacgagacatacgtgccaaaggagtttaacgccgagacattcaccttccacgccgacatctgtaccctgtccgagaaggagagacagatcaagaagcagacagccctggtggagctggtgaagcacaagcctaaggccaccaaggagcagctgaaggccgtgatggacgattttgccgccttcgtggagaagtgctgtaaggccgacgataaggagacatgcttcgccgaggagggcaagaagctggtcgccgcttcacaggctgctctggggctgcatcaccaccaccaccactgataagcttggatcc

SEQ ID NO: 161 - DNA, 3504 bp, synthetic construct
  source 1..3504: mol_type = other DNA
gaattcgccaccatgaagtgggtcacctttatttctctgctgtttctgttctccagtgcctattcccgtggggtctttcgtcgttccgagtcacctgtgaccatcagcagggctggaaacgctggagagctggtgtctccactgctgctgccacctacaaggaggagaaggaggaggcacatccagggaccaggaccagtgctgaatctgccatccgccgctgccgctccacccgtggctagggctccagaggctgctggaggaggctctagatccgaggattactccagctctcctcactccgctgctgctgctgccagaccactggctgctgaggagaagcaggctcagagcctgcagccctccagctctagacgctccagccattatcctgctgctgtgcagagccaggctgctgctgagaggggagcttctgccaccgctaagagcagggccatctctatcctgcagaagaagccacgccaccagcagctgctgccctctctgtcttccttctttttctcccataggctgcctgacatggaggagccccagtctgatccttccgtggagcctccactgtctcaggagacattctccgacctgtggaagctgctgcccgagaacaatgtgctgtcccctctgccaagccaggctatggacgatctgatgctgagccctgacgatatcgagcagtggtttaccgaggaccccggccctgatgaggctccaaggatgccagaggctgctccacctgtggccccagctcccgccgctcctacaccagctgctccagctcctgctccatcttggcctctgagctcttccgtgccaagccagaagacctaccagggctcttatggctttagactgggcttcctgcacagcggcacagccaagtctgtgacctgcacatactccccagctctgaacaagatgttctgccagctggccaagacctgtcccgtgcagctgtgggtggattctaccccaccacctggaacaagggtgcgggctatggctatctataagcagtcccagcacatgacagaggtggtgaggcggtgcccccaccatgagaggtgtagcgactctgatggcctggctccaccacagcatctgatccgcgtggagggcaacctgagggtggagtacctggacgatcgcaataccttcaggcactccgtggtggtgccctatgagcctccagaagtgggcagcgactgtaccacaatccattacaactatatgtgcaatagctcttgtatgggcggcatgaacagacgccctatcctgaccatcatcacactggaggattccagcggcaacctgctgggcaggaactcctttgaggtgagagtgtgcgcttgtcctggacgcgacaggagaaccgaggaggagaatctgaggaagaagggagagccacaccatgagctgccacctggcagcaccaagagggctctgcctaacaatacatcttccagcccccagcccaagaagaagccactggatggcgagtacttcacactgcagatcagaggccgcgagaggtttgagatgttcagggagctgaacgaggctctggagctgaaggacgcccaggctggcaaggagccaggaggctcccgggctcactcttcccatctgaagagcaagaagggccagtccaccagcagacacaagaagctgatgtttaagacagagggccccgattccgacgatgctcacaagagcgaggtggcccatcgctttaaggacctgggcgaggagaatttcaaggccctggtgctgatcgcctttgctcagtacctgcagcagtgccccttcgaggaccacgtgaagctggtgaacgaggtgaccgagtttgctaagacatgcgtggctgacgagtccgccgagaattgtgataagagcctgcataccctgttcggcgataagctgtgtaccgtggccacactgcgcgagacatatggcgagatggctgactgctgtgccaagcaggagccagagaggaacgagtgctttctgcagcataaggacgataaccctaatctgccaaggctggtgaggcccgaggtggacgtgatgtgtaccgcttttcacgataatgaggagacattcctgaagaagtacctgtatgagatcgccagacgccatccttacttctatgctccagagctgctgtttttcgccaagcggtacaaggccgcttttaccgagtgctgtcaggccgctgataaggccgcttgcctgctgcctaagctggacgagctgcgggatgagggcaaggctagctctgccaagcagagactgaagtgtgctagcctgcagaagtttggcgagagggccttcaaggcttgggctgtggctaggctgtctcagagatttccaaaggctgagttcgccgaggtgtccaagctggtgaccgacctgacaaaggtgcacaccgagtgctgtcatggcgacctgctggagtgcgccgacgatagggctgatctggccaagtacatctgtgagaaccaggacagcatctccagcaagctgaaggagtgctgtgagaagcctctgctggagaagtctcactgcatcgctgaggtggagaacgacgagatgccagccgatctgccctctctggccgctgacttcgtggagtccaaggatgtgtgtaagaattacgctgaggccaaggatgtgtttctgggcatgttcctgtacgagtatgctaggcggcaccctgactactctgtggtgctgctgctgcgcctggccaagacctatgagacaacactggagaagtgctgtgccgctgccgatccacatgagtgctatgctaaggtgtttgacgagttcaagcccctggtggaggagcctcagaacctgatcaagcagaattgtgagctgttcgagcagctgggcgagtacaagtttcagaacgccctgctggtgaggtataccaagaaggtgccacaggtgagcacccccacactggtggaggtgtctcggaatctgggcaaggtcggctccaagtgctgtaagcaccccgaggctaagagaatgccttgcgccgaggattacctgagcgtggtgctgaaccagctgtgtgtgctgcatgagaagacccccgtgtctgaccgggtgaccaagtgctgtacagagtctctggtgaacagacgcccctgcttctccgctctggaggtggatgagacatatgtgcctaaggagtttaatgctgagacattcaccttccacgccgacatctgtaccctgtctgagaaggagagacagatcaagaagcagacagccctggtggagctggtgaagcataagcctaaggctaccaaggagcagctgaaggccgtgatggacgattttgctgccttcgtggagaagtgctgtaaggctgacgataaggagacatgctttgccgaggagggaaagaaactggtcgccgcatctcaggccgctctgggactgcatcatcatcatcatcactgatagggatcc

SEQ ID NO: 162 - protein, 343 aa, unidentified
IVSRNKRRYQEDGFDLDLTYIYPNIIAMGFPAERLEGVYRNNIDDVVRFLDSKHKNHYKIYNLCAERHYDTAKFNCRVAQYPFEDHNPPQLELIKPFCEDLDQWLSEDDNHVAAIHCKAGKGRTGVMICAYLLHRGKFLKAQEALDFYGEVRTRDKKGVTIPSQRRYVYYYSYLLKNHLDYRPVALLFHKMMFETIPMFSGGTCNPQFVVCQLKVKIYSSNSGPTRREDKFMYFEFPQPLPVCGDIKVEFFHKQNKMLKKDKMFHFWVNTFFIPGPEETSEKVENGSLCDQEIDSICSIERADNDKEYLVLTLTKNDLDKANKDKANRYFSPNFKVKLYFTKT

SEQ ID NO: 163 - protein, 323 aa, Homo sapiens
DKSLHTLFGDKLCTVATLRETYGEMADCCAKQEPERNECFLQHKDDNPNLPRLVRPEVDVMCTAFHDNEETFLKKYLYEIARRHPYFYAPELLFFAKRYKAAFTECCQAADKAACLLPKLDELRDEGKASSAKQRLKCASLQKFGERAFKAWAVARLSQRFPKAEFAEVSKLVTDLTKVHTECCHGDLLECADDRADLAKYICENQDSISSKLKECCEKPLLEKSHCIAEVENDEMPADLPSLAADFVESKDVCKNYAEAKDVFLGMFLYEYARRHPDYSVVLLLRLAKTYETTLEKCCAAADPHECYAKVFDEFKPLVEEPQ

SEQ ID NO: 164 - protein, 13 aa, synthetic construct
TNRRKKRALDAAY

SEQ ID NO: 165 - protein, 8 aa, synthetic construct
GPAALKAA

SEQ ID NO: 166 - DNA, 1209 bp, synthetic construct
  source 1..1209: mol_type = other DNA
atgaccgccatcatcaaggagatcgtgagcagaaacaagaggagataccaggaggacggcttcgacctggatctgacatacatctaccctaacatcatcgctatgggatttccagctgagcggctggagggcgtgtacaggaacaacatcgacgatgtggtgcggttcctggactccaagcacaagaaccactacaagatctacaacctgtgcgctgagaggcactacgacaccgccaagttcaactgtagagtggctcagtacccttttgaggatcacaaccctccacagctggagctgatcaagccattctgcgaggacctggatcagtggctgagcgaggacgataaccacgtggctgccatccactgcaaggccggaaagggccggacaggagtgatgatctgtgcttacctgctgcaccgcggcaagttcctgaaggctcaggaggccctggacttttacggagaggtgaggaccagagataagaagggcgtgacaatcccttcccagcggcgctacgtgtactactactcttacctgctgaagaaccacctggactaccgcccagtggccctgctgtttcacaagatgatgttcgagacaatcccaatgttctctggaggcacatgcaacccccagtttgtggtgtgccagctgaaggtgaagatctacagctccaacagcggaccaaccaggagagaggacaagttcatgtactttgagttcccacagcctctgcccgtgtgcggcgatatcaaggtggagtttttccacaagcagaacaagatgctgaagaaggacaagatgtttcacttctgggtcaacacctttttcatccccggacctgaggagacaagcgagaaggtggagaacggctccctgtgcgaccaggagatcgattctatctgtagcatcgagcgggccgacaacgataaggagtacctggtgctgaccctgacaaagaacgacctggataaggctaacaaggataaggccaaccgctacttttcccccaacttcaaggtgaagctgtacttcaccaagacagtggaggagccttctaacccagaggcctctagctccacctctgtgacaccagacgtgagcgataacgagcccgaccactacaggtacagcgataccacagactccgatcccgagaacgagccttttgacgaggatcagcacagccagatcaccaaggtg

SEQ ID NO: 167 - DNA, 1665 bp, synthetic construct
  source 1..1665: mol_type = other DNA
tcagagtcaccagtcaccatcgctagggctggaaacgctggagagctgctgtcccctctgctgctgccccctacaaggagacggcgcaggagacacgtgcagggacctggaccagtgctgtccctgccatctgccgctgctgctccaccactggctagggctcctgaggccgctggcggaggctctcgctgcgaggactacccaagctccccacacagcgccgcttccgccgctcggccactggctgctgaggagaagcaggctcagagcctgcagccttctagctcccggcgctctagccactacccagctgctgtgcagggacaggctgctgctgagaggggagcttccgccaccgctaagtccagagccatctctatcctgcagaagaagccaaggcaccagcagctgctgccttccctgtcctctttctttttctctcacaggctgcctgatatgaccgccatcatcaaggagatcgtgagcagaaacaagaggagataccaggaggacggcttcgacctggatctgacatacatctaccctaacatcatcgctatgggatttccagctgagcggctggagggcgtgtacaggaacaacatcgacgatgtggtgcggttcctggactccaagcacaagaaccactacaagatctacaacctgtgcgctgagaggcactacgacaccgccaagttcaactgtagagtggctcagtacccttttgaggatcacaaccctccacagctggagctgatcaagccattctgcgaggacctggatcagtggctgagcgaggacgataaccacgtggctgccatccactgcaaggccggaaagggccggacaggagtgatgatctgtgcttacctgctgcaccgcggcaagttcctgaaggctcaggaggccctggacttttacggagaggtgaggaccagagataagaagggcgtgacaatcccttcccagcggcgctacgtgtactactactcttacctgctgaagaaccacctggactaccgcccagtggccctgctgtttcacaagatgatgttcgagacaatcccaatgttctctggaggcacatgcaacccccagtttgtggtgtgccagctgaaggtgaagatctacagctccaacagcggaccaaccaggagagaggacaagttcatgtactttgagttcccacagcctctgcccgtgtgcggcgatatcaaggtggagtttttccacaagcagaacaagatgctgaagaaggacaagatgtttcacttctgggtcaacacctttttcatccccggacctgaggagacaagcgagaaggtggagaacggctccctgtgcgaccaggagatcgattctatctgtagcatcgagcgggccgacaacgataaggagtacctggtgctgaccctgacaaagaacgacctggataaggctaacaaggataaggccaaccgctacttttcccccaacttcaaggtgaagctgtacttcaccaagacagtggaggagccttctaacccagaggcctctagctccacctctgtgacaccagacgtgagcgataacgagcccgaccactacaggtacagcgataccacagactccgatcccgagaacgagccttttgacgaggatcagcacagccagatcaccaaggtg

SEQ ID NO: 168 - DNA, 111 bp, synthetic construct
  source 1..111: mol_type = other DNA
ctgccacctacacggagaaggcgccggagacacatccagggaccaggacctgtgctgaacctgccaagcgccgccgccgccccacccgtggccagagccccagaggcagca

SEQ ID NO: 169 - DNA, 18 bp, synthetic construct
  source 1..18: mol_type = other DNA
cggagaaggcgccggaga

SEQ ID NO: 170 - DNA, 48 bp, synthetic construct
  source 1..48: mol_type = other DNA
ccacctacacggagaaggcgccggagacacatccagggaccaggacct

SEQ ID NO: 171 - DNA, 1728 bp, synthetic construct
  source 1..1728: mol_type = other DNA
ctggagcgggggggagaagcggcggcggcggcggccgcggcggctgcagctccagggagggggagcgagagccctgtgaccatctccagggccggaaatgcaggagagctggtgtctcctctgctgctgccacctacacggagaaggcgccggagacacatccagggaccaggacctgtgctgaacctgccaagcgccgccgccgccccacccgtggccagagccccagaggcagcaggaggaggctccagatctgaggactatagctcctctccacacagcgccgccgccgccgcccggcccctggccgccgaggagaagcaggcccagtctctgcagcccagctcctctaggcgcagctcccactaccctgcagcagtgcagtcccaggctgccgccgagaggggagcctctgccaccgcaaagtctcgcgccatcagcatcctgcagaagaagccacgccaccagcagctgctgccctctctgtctagcttctttttcagccaccggctgcccgacatgaccgccatcatcaaggagatcgtgagcagaaataagcggcggtaccaggaggatggcttcgacctggatctgacatatatctaccccaacatcatcgccatgggatttcctgcagagcggctggagggcgtgtacagaaacaatatcgacgatgtggtgaggttcctggactccaagcacaagaaccactataagatctacaatctgtgcgccgagaggcactatgataccgccaagttcaactgtcgcgtggcccagtacccctttgaggaccacaatcctccacagctggagctgatcaagcctttctgcgaggacctggatcagtggctgtccgaggacgataatcacgtggcagcaatccactgcaaggcaggcaagggcaggacaggcgtgatgatctgtgcctatctgctgcaccgcggcaagttcctgaaggcccaggaggccctggacttttacggcgaggtgaggacccgcgataagaagggcgtgacaatcccaagccagcggcggtacgtgtactattactcctacctgctgaagaaccacctggactacaggccagtggccctgctgtttcacaagatgatgttcgagacaatccctatgttctccggcggcacatgcaacccacagtttgtggtgtgccagctgaaggtgaagatctattcctctaattctggcccaacccggagagaggataagttcatgtactttgagttcccacagccactgcccgtgtgcggcgacatcaaggtggagtttttccacaagcagaacaagatgctgaagaaggataagatgtttcacttctgggtgaatacctttttcatcccaggccccgaggagacatccgagaaggtggagaatggctctctgtgcgaccaggagatcgatagcatctgttccatcgagcgggccgacaacgataaggagtacctggtgctgaccctgacaaagaatgacctggataaggccaacaaggacaaggccaatagatacttcagccccaacttcaaggtgaagctgtacttcaccaagacagtggaggagccttccaatccagaggccagctcctctaccagcgtgacacctgacgtgtccgataacgagccagaccactatcggtactccgataccacagactctgatccagagaacgagccctttgacgaggatcagcacacccagatcacaaaggtg

SEQ ID NO: 172 - DNA, 1209 bp, synthetic construct
  source 1..1209: mol_type = other DNA
atgaccgccatcatcaaggagatcgtgagcagaaataagcggcggtaccaggaggatggcttcgacctggatctgacatatatctaccccaacatcatcgccatgggatttcctgcagagcggctggagggcgtgtacagaaacaatatcgacgatgtggtgaggttcctggactccaagcacaagaaccactataagatctacaatctgtgcgccgagaggcactatgataccgccaagttcaactgtcgcgtggcccagtacccctttgaggaccacaatcctccacagctggagctgatcaagcctttctgcgaggacctggatcagtggctgtccgaggacgataatcacgtggcagcaatccactgcaaggcaggcaagggcaggacaggcgtgatgatctgtgcctatctgctgcaccgcggcaagttcctgaaggcccaggaggccctggacttttacggcgaggtgaggacccgcgataagaagggcgtgacaatcccaagccagcggcggtacgtgtactattactcctacctgctgaagaaccacctggactacaggccagtggccctgctgtttcacaagatgatgttcgagacaatccctatgttctccggcggcacatgcaacccacagtttgtggtgtgccagctgaaggtgaagatctattcctctaattctggcccaacccggagagaggataagttcatgtactttgagttcccacagccactgcccgtgtgcggcgacatcaaggtggagtttttccacaagcagaacaagatgctgaagaaggataagatgtttcacttctgggtgaatacctttttcatcccaggccccgaggagacatccgagaaggtggagaatggctctctgtgcgaccaggagatcgatagcatctgttccatcgagcgggccgacaacgataaggagtacctggtgctgaccctgacaaagaatgacctggataaggccaacaaggacaaggccaatagatacttcagccccaacttcaaggtgaagctgtacttcaccaagacagtggaggagccttccaatccagaggccagctcctctaccagcgtgacacctgacgtgtccgataacgagccagaccactatcggtactccgataccacagactctgatccagagaacgagccctttgacgaggatcagcacacccagatcacaaaggtg

SEQ ID NO: 173 - DNA, 4401 bp, synthetic construct
  source 1..4401: mol_type = other DNA
gtacatttatattggctcatgtccaatatgaccgccatgttgacattgattattgactagttattaatagtaatcaattacggggtcattagttcatagcccatatatggagttccgcgttacataacttacggtaaatggcccgcctggctgaccgcccaacgacccccgcccattgacgtcaataatgacgtatgttcccatagtaacgccaatagggactttccattgacgtcaatgggtggagtatttacggtaaactgcccacttggcagtacatcaagtgtatcatatgccaagtccgccccctattgacgtcaatgacggtaaatggcccgcctggcattatgcccagtacatgaccttacgggactttcctacttggcagtacatctacgtattagtcatcgctattaccatggtgatgcggttttggcagtacaccaatgggcgtggatagcggtttgactcacggggatttccaagtctccaccccattgacgtcaatgggagtttgttttggcaccaaaatcaacgggactttccaaaatgtcgtaataaccccgccccgttgacgcaaatgggcggtaggcgtgtacggtgggaggtctatataagcagagctcgtttagtgaaccgtcagatcctcactctcttccgcatcgctgtctgcgagggccagctgttgggctcgcggttgaggacaaactcttcgcggtctttccagtactcttggatcggaaacccgtcggcctccgaacggtactccgccaccgagggacctgagcgagtccgcatcgaccggatcggaaaacctctcgagaaaggcgtctaaccagtcacagtcgcaaggtaggctgagcaccgtggcgggcggcagcgggtggcggtcggggttgtttctggcggaggtgctgctgatgatgtaattaaagtaggcggtcttgagacggcggatggtcgaggtgaggtgtggcaggcttgagatccagctgttggggtgagtactccctctcaaaagcgggcattacttctgcgctaagattgtcagtttccaaaaacgaggaggatttgatattcacctggcccgatctggccatacacttgagtgacaatgacatccactttgcctttctctccacaggtgtccactcccaggtccaagtttaaacggatctctagcgaattccctctagagggcccgtttctgctagcaagcttgctagcggccgctcgaggccggcaaggccggatcccccgacctcgacctctggctaataaaggaaatttattttcattgcaatagtgtgttggaattttttgtgtctctcactcggaaggacatatgggagggcaaatcatttggtcgagatccctcggagatctctagctagaggatcgatccccgccccggacgaactaaacctgactacgacatctctgccccttcttcgcggggcagtgcatgtaatcccttcagttggttggtacaacttgccaactgaaccctaaacgggtagcatatgcttcccgggtagtagtatatactatccagactaaccctaattcaatagcatatgttacccaacgggaagcatatgctatcgaattagggttagtaaaagggtcctaaggaacagcgatgtaggtgggcgggccaagataggggcgcgattgctgcgatctggaggacaaattacacacacttgcgcctgagcgccaagcacagggttgttggtcctcatattcacgaggtcgctgagagcacggtgggctaatgttgccatgggtagcatatactacccaaatatctggatagcatatgctatcctaatctatatctgggtagcataggctatcctaatctatatctgggtagcatatgctatcctaatctatatctgggtagtatatgctatcctaatttatatctgggtagcataggctatcctaatctatatctgggtagcatatgctatcctaatctatatctgggtagtatatgctatcctaatctgtatccgggtagcatatgctatcctaatagagattagggtagtatatgctatcctaatttatatctgggtagcatatactacccaaatatctggatagcatatgctatcctaatctatatctgggtagcatatgctatcctaatctatatctgggtagcataggctatcctaatctatatctgggtagcatatgctatcctaatctatatctgggtagtatatgctatcctaatttatatctgggtagcataggctatcctaatctatatctgggtagcatatgctatcctaatctatatctgggtagtatatgctatcctaatctgtatccgggtagcatatgctatcctcatgataagctgtcaaacatgagaattaattcttgaagacgaaagggcctcgtgatacgcctatttttataggttaatgtcatgataataatggtttcttagacgtcaggtggcacttttcggggaaatgtgcgcggaacccctatttgtttatttttctaaatacattcaaatatgtatccgctcatgagacaataaccctgataaatgcttcaataatattgaaaaaggaagagtatgagtattcaacatttccgtgtcgcccttattcccttttttgcggcattttgccttcctgtttttgctcacccagaaacgctggtgaaagtaaaagatgctgaagatcagttgggtgcacgagtgggttacatcgaactggatctcaacagcggtaagatccttgagagttttcgccccgaagaacgttttccaatgatgagcacttttaaagttctgctatgtggcgcggtattatcccgtgttgacgccgggcaagagcaactcggtcgccgcatacactattctcagaatgacttggttgagtactcaccagtcacagaaaagcatcttacggatggcatgacagtaagagaattatgcagtgctgccataaccatgagtgataacactgcggccaacttacttctgacaacgatcggaggaccgaaggagctaaccgcttttttgcacaacatgggggatcatgtaactcgccttgatcgttgggaaccggagctgaatgaagccataccaaacgacgagcgtgacaccacgatgcctgcagcaatggcaacaacgttgcgcaaactattaactggcgaactacttactctagcttcccggcaacaattaatagactggatggaggcggataaagttgcaggaccacttctgcgctcggcccttccggctggctggtttattgctgataaatctggagccggtgagcgtgggtctcgcggtatcattgcagcactggggccagatggtaagccctcccgtatcgtagttatctacacgacggggagtcaggcaactatggatgaacgaaatagacagatcgctgagataggtgcctcactgattaagcattggtaactgtcagaccaagtttactcatatatactttagattgatttaaaacttcatttttaatttaaaaggatctaggtgaagatcctttttgataatctcatgaccaaaatcccttaacgtgagttttcgttccactgagcgtcagaccccgtagaaaagatcaaaggatcttcttgagatcctttttttctgcgcgtaatctgctgcttgcaaacaaaaaaaccaccgctaccagcggtggtttgtttgccggatcaagagctaccaactctttttccgaaggtaactggcttcagcagagcgcagataccaaatactgttcttctagtgtagccgtagttaggccaccacttcaagaactctgtagcaccgcctacatacctcgctctgctaatcctgttaccagtggctgctgccagtggcgataagtcgtgtcttaccgggttggactcaagacgatagttaccggataaggcgcagcggtcgggctgaacggggggttcgtgcacacagcccagcttggagcgaacgacctacaccgaactgagatacctacagcgtgagctatgagaaagcgccacgcttcccgaagggagaaaggcggacaggtatccggtaagcggcagggtcggaacaggagagcgcacgagggagcttccagggggaaacgcctggtatctttatagtcctgtcgggtttcgccacctctgacttgagcgtcgatttttgtgatgctcgtcaggggggcggagcctatggaaaaacgccagcaacgcggcctttttacggttcctggccttttgctggccttttgctcacatgttctttcctgcgttatcccctgattctgtggataaccgtattaccgcctttgagtgagctgataccgctcgccgcagccgaacgaccgagcgcagcgagtcagtgagcgaggaagc

SEQ ID NO: 174 - DNA, 7793 bp, synthetic construct
  source 1..7793: mol_type = other DNA
agatctgcggccgcaccggtttaatttgaaaattgatattagcgtttaacagttaaattaatacgttaataatttttttgtctttaaatagggatttgaagcatattggtgttatagcgtacttagctggccagcatataagtattctataaaatactattacaaggaggaaatttacatgaaattatcgaagcgtggtttattctggctgttaggtttagtctcatttgcgatcttgttgttgttctctcagcccttgggtgctcaagcttcagagtctccagtgacgatttcgcgggcgggtaacgccggtgaattggttagcccgctattgctgccaccgacccgccgacggcgtcggcgtcatattcagggcccaggtccggttttgaacttgccttcagcggcagctgcgcctcccgtcgctcgggcacctgaagccgctgggggcggctcgcgctcagaggattatagtagtagtccccacagtgccgccgctgcggcccgccccctagccgccgaggaaaaacaagcacagtcattacagccttctagttcacgccgtagttctcattacccggcagctgtccaaagccaagcggcggccgagcgtggggcaagcgccactgccaagagccgtgcaatttcgattttacaaaagaaaccacgtcatcaacagttactgccgtcattatctagctttttctttagtcatcggctaccagatatgacagctattattaaagaaattgttagtcgaaataagcggcgctatcaagaagatggtttcgatttagatttaacatacatttatccaaatatcattgcgatgggatttcccgctgagcggttggaaggcgtctatcgaaacaatatcgacgatgttgtccggtttttagattcgaagcataagaatcactacaagatttacaacctgtgtgcagaacggcattatgacactgcgaagtttaattgtcgagttgcacaatatccgtttgaagatcataaccccccacaattagagttaatcaaaccattttgtgaagatttagatcagtggttaagtgaagatgataatcacgtggcggctattcattgtaaggctgggaagggtcgtacaggcgtgatgatttgcgcttacttattacaccgtggaaagtttctaaaagcgcaagaagcattagatttctatggtgaagttcgtacccgagataaaaagggcgtcacgatcccgagtcaacgccgctatgtttactactattcgtacttactaaagaatcacctagattatcgcccagtcgctttgttgttccataagatgatgtttgaaacgattccaatgttttctggtggcacgtgtaacccgcaatttgtagtgtgtcaactaaaagtgaagatatatagttcaaatagtgggcccactcgacgggaagataagttcatgtatttcgagtttccacagccattgccagtttgcggagacatcaaagtcgaatttttccacaagcaaaataagatgctgaaaaaagataaaatgtttcacttttgggtaaacactttctttattccaggaccagaagaaacctctgaaaaagtcgaaaatggttcgttatgcgatcaagaaattgattcgatttgtagtattgaacgtgcggacaatgacaaagaatatctggtattgactttgacgaaaaatgacttggacaaagccaataaagataaggcaaatcggtacttttcaccgaacttcaaggtcaaattatattttacgaaaactgtggaagaaccatcaaatccagaggcaagctcaagcaccagtgttacacctgacgtcagtgacaacgaacctgatcattatcggtatagcgacaccacggattcagatcctgaaaatgaaccgtttgacgaagatcaacatactcagatcacgaaagtttgatctagactcgaggaattcggtaccccgggttcgaaggcgccaagcttcaaattacagcacgtgttgctttgattgatagccaaaaagcagcagttgataaagcaattactgatattgctgaaaaattgtaatttataaataaaaatcaccttttagaggtggtttttttatttataaattattcgtttgatttcgctttcgatagaacaatcaaagcgagaataaggaagataaatcccataagggcgggagcagaatgtccgagactaattcatgaccaaaatcccttaacgtgagttttcgttccactgagcgtcagaccccgtagaaaagatcaaaggatcttcttgagatcctttttttctgcgcgtaatctgctgcttgcaaacaaaaaaaccaccgctaccagcggtggtttgtttgccggatcaagagctaccaactctttttccgaaggtaactggcttcagcagagcgcagataccaaatactgtccttctagtgtagccgtagttaggccaccacttcaagaactctgtagcaccgcctacatacctcgctctgctaatcctgttaccagtggctgctgccagtggcgataagtcgtgtcttaccgggttggactcaagacgatagttaccggataaggcgcagcggtcgggctgaacggggggttcgtgcacacagcccagcttggagcgaacgacctacaccgaactgagatacctacagcgtgagctatgagaaagcgccacgcttcccgaagggagaaaggcggacaggtatccggtaagcggcagggtcggaacaggaggcgcacgagggagcttccagggggaaacgcctggtatctttatagtcctgtcgggtttcgccacctctgacttgagcgtcgatttttgtgatgctcgtcaggggggcggagcctatcgaaaaacgccagcaacgcggcctttttacggttcctggccttttgctggccttttgctcacatgttctttcctgcgttatcccctgattctgtggataaccgtattaccgcctttgagtgagctgataccgctcgccgcagccgaacgaccgagcgcagcgagtcagtgagcgagaaggattattcggctggttgagacgttaaaatgataaaggttgtattaatcttatattacggttataatgtactcaacttaataaatgaacgcaaaaaaaagaaccctcaacttagcagagttaggattcacgacttatcagcacaacctgataagattttcgatagcaagtactaccaatacaagctatctaacttggtactattataacatgtaggctaagtttttcaaccattgatacttaaagtaaacggttgttatcgggaatcttaacagaaacctgatagcaaccgtttttttgttattcaatggttagcaaccatcaaagcaactaaaggctggaaacctgttcttagctagtaaaacctcccgtgagtgtcgttcgtgaccccgcttgcagttaacaacataggtatgctaaaccttgtcgagatcaacgcgactaaagacgtggctggaagactaggaaatgatacggacaggctaactattaacgcagattattcgggttgctgctaaaaccaactctaataatagttagtgcaagggctggttgagcttaaattgtctgataaagagttctctctttatactgcaaaagaagcgcagttattcacgattaggataactgtttgagagagcctaagggcttgacccttgatggtttaagcaccgctatgcgtgcgggatccccttagaagcaaacttaagagtgtgttgatagtgcattatcttaaaattttgtataataggaattgaagttaaattagatgctaaaaataggaattgaagttaaattagatgctaaaaatttgtaattaagaaggagggattcgtcatgttggtattccaaatgcgtaatgtagataaaacatctactgttttgaaacagactaaaaacagtgattacgcagataaataaatacgttagattaattcctaccagtgactaatcttatgactttttaaacagataactaaaattacaaacaaatcgtttaacttcaggagagattacatggttgtaattggggagcaccgccacacacaagtcacagtcgacttgcaggcaattaagacaaatattagtaatgaaatggcgcaaaaggatgagttgaccgagttatgggcagtcgttaaagcgaatggttatggacatggaattatccaagttgctcaggccgccaaagaagccggggcgaccggcttttgtgttgcaatcctggatgaggccttagcgttgcgggccgctggctttgcggaacccatcctagtacttggaattacggaaccggaatacgccccactggtagctgaaaaggatatttcactagctgttggaacgcaagattggctgactacggccgcagcaattttagcggctaatcaagtgacgacaccacttcacgttcatcttgcattagatacgggtatgggacgaatcgggtttcagacgcccgaagaattggcaacggcggttacgactttgcgtcaaccgcagtcaccatttgactttgaagggatttttacgcattttgcaacggctgaccaggcagatgatacgtattttactcatcaattaaataattggaaacacttgattgcagtggtggatgagctaccacgctatgtccacgtgtccaattcggccaccagtctctggcatcaagcttgcaatggcaacatggtgcgctttggggttgcactctatggtctaaatccttctggtcgcgaactcagcgcaccataccccttgcaacccgcgttgtcgctaacggcacgcttgacgtttgttaaacgcttggctcggggcaaatcggtcagctatggtgccacgtatacggccgcacaggatgaatggattggcacggtgccgattgggtatgcggacggctatgaacgccgattacaaggcttccatgtacttgttgatggtgagttttgcgaaatcgtcggacgggtctgcatggaccagctgatggttcgtctgccacatgaagtaccggttggagctaaggtaactttggttggcacggacggtgctcgtaccatttcgttgcaagatattgctgactattgtgggacaattcattatgagattgcttgtgggttagcaccacgagtgccgagagtttatatagattaattctatgagtcgcttttttaaatttggaaagttacacgttactaaagggaatggagaccggggcccttcaatagagttcttaacgttaatccgaaaaaaactaacgttaatattaaaaaataagatccgcttgtgaattatgtataatttgattagactaaagaataggagaaagtatgatgatatttaaaaaactttctcgttaagataggttgttggtgagcatgttatatacggatgtatcggtttccttaatgcaaaattttgttgctatcttattaatttttctattatatagatatattcaaagaaagataacatttaaacggatcatattagatattttaatagcgattattttttcaatattatatctgtttatttcagatgcgtcattacttgtaatggtattaatgcgattagggtggcattttcatcaacaaaaagaaaataagataaaaacgactgatacagctaatttaattctaattatcgtgatccagttattgttagttgcggttgggactattattagtcagtttaccatatcgattatcaaaagtgatttcagccaaaatatattgaacaatagtgcaacagatataactttattaggtattttctttgctgttttatttgacggcttgttctttatattattgaagaataagcggactgaattacaacatttaaatcaagaaatcattgaattttcgttagaaaaacaatattttatatttatatttattttatttatagtaatagaaattattttagcagttgggaatcttcaaggagtaacagccacgatattattaaccattatcattattttttgtgtccttatcgggatgactttttggcaagtgatgctttttttgaaggcttattcgattcgccaagaagccaatgaccaattggtccggaatcaacaacttcaagattatctagtcaatatcgaacagcagtacaccgaattacggcgatttaagcatgattatcaaaacatcttattatcgttggagagttttgccgaaaagggcgatcagcaacagtttaaggcgtattaccaagaattattagcacaacggccaattcaaagtgaaatccaaggggcagtcattgcacaactcgactacttgaaaaatgatcctattcgaggattagtcattcaaaagtttttggcagccaaacaggctggtgttactttaaaattcgaaatgaccgaaccaatcgaattagcaaccgctaatctattaacggttattcggattatcggtattttattagacaatgcgattgaacaagccgttcaagaaaccgatcaattggtgagttgtgctttcttacaatctgatggtttaatcgaaattacgattgaaaatacggccagtcaagttaagaatctccaagcattttcagagttaggctattcaacgaaaggcgctggtcgggggactggtttagctaatgtgcaggatttgattgccaaacaaaccaatttattcttagaaacacagattgaaaatagaaagttacgacagacattgatgattacggaggaaacttaatttgtatcccgtttatttattagaggatgatttacagcaacaagcgatttatcagcaaattatcgcgaatacgattatgattaacgaatttgcaatgactttaacatgcgctgccagtgatactgagacattgttggcggcaattaaggatcagcaacgaggtttattctttttggatatggaaattgaggataaccgccaagccggtttagaagtggcaactaagattcggcagatgatgccgtttgcgcaaattgtcttcattacaacccacgaggaactgacattattaacgttagaacgaaaaatagcgcctttagattacattctcaaggaccaaacaatggctgaaatcaaaaggcaattgattgatgatctattgttagctgagaagcaaaacgaggcggcagcgtatcaccgagaaaatttatttagttataaaataggtcctcgctttttctcattaccattaaaggaagttgtttatttatatactgaaaaagaaaatccgggtcatattaatttgttagccgttaccagaaaggttacttttccaggaaatttaaatgcgctggaagcccaatatccaatgctctttcggtgtgataaaagttacttagttaacctatctaatattgccaattatgacagtaaaacacggagtttaaaatttgtagatggcagtgaggcaaaagtctcgttccggaaatcacgggaactagtggccaaattaaaacaaatgatgtagcgcctgcaggcacgccaaatgatcccagtaaaaagccacccgcatggcgggtggctttttattagccctagaagggcttcccacacgcatttcagcgccttagtgccttagtttgtgaatcataggtggtatagtcccgaaatacccgtctaaggaattgtcagataggcctaatgactggcttttataatatgagataatgccgactgtactttttacagtcggttttctaatgtcactaacctgccccgttagttgaagaaggtttttatattacagctcc

SEQ ID NO: 175 - DNA, 5391 bp, synthetic construct
  source 1..5391: mol_type = other DNA
aacatccaaagacgaaaggttgaatgaaacctttttgccatccgacatccacaggtccattctcacacataagtgccaaacgcaacaggaggggatacactagcagcagaccgttgcaaacgcaggacctccactcctcttctcctcaacacccacttttgccatcgaaaaaccagcccagttattgggcttgattggagctcgctcattccaattccttctattaggctactaacaccatgactttattagcctgtctatcctggcccccctggcgaggttcatgtttgtttatttccgaatgcaacaagctccgcattacacccgaacatcactccagatgagggctttctgagtgtggggtcaaatagtttcatgttccccaaatggcccaaaactgacagtttaaacgctgtcttggaacctaatatgacaaaagcgtgatctcatccaagatgaactaagtttggttcgttgaaatgctaacggccagttggtcaaaaagaaacttccaaaagtcggcataccgtttgtcttgtttggtattgattgacgaatgctcaaaaataatctcattaatgcttagcgcagtctctctatcgcttctgaaccccggtgcacctgtgccgaaacgcaaatggggaaacacccgctttttggatgattatgcattgtctccacattgtatgcttccaagattctggtgggaatactgctgatagcctaacgttcatgatcaaaatttaactgttctaacccctacttgacagcaatatataaacagaaggaagctgccctgtcttaaacctttttttttatcatcattattagcttactttcataattgcgactggttccaattgacaagcttttgattttaacgacttttaacgacaacttgagaagatcaaaaaacaactaattattgaaagaattcaaaacgatgagatttccttcaatttttactgctgttttattcgcagcatcctccgcattagctgctccagtcaacactacaacagaagatgaattagaaggggatttcgatgttgctgttttgccattttccgccagcattgctgctaaagaagaaggggtatctctcgagaaaagaatgtctgagtcgccagtgactatctccagagccggaaatgccggtgaattagtttccccactgttgttgccgcccactcgtagacgtaggcgtagacatatccagggaccaggaccagtgctgaatttaccttcagctgctgctgctccgccggtagctagggccccagaagcggcaggaggtggttctaggtccgaggattactctagctctccacattcggctgctgccgccgcaagacctttagcagcagaagagaagcaagcacaatctttgcaaccttcctcctctagaagatcaagccattatcctgctgctgtccagagtcaggcagctgctgagaggggtgcctctgctactgccaaatctagagctatatctatcttgcagaaaaagcctagacaccaacaactccttccatccctgtcgagtttcttcttctctcacaggctcccagatatgactgccattatcaaggagatcgtcagtcgtaacaagagaagataccaagaggacggcttcgacctggatcttacatatatttacccaaacatcatagctatggggttccccgcagaaagattggaaggtgtctatagaaataatattgacgacgttgttagatttctagatagcaaacataaaaatcactacaagatatacaacctctgtgctgaaagacactacgacactgctaagttcaattgtagagtagcacagtaccccttcgaggatcataatcctccacaacttgagttgatcaaacctttttgtgaggacttggaccaatggctgtcagaggacgataatcacgtcgcagctattcattgtaaggctggaaaaggtcgaacaggagtcatgatttgtgcttatctactgcacagaggtaagtttctaaaagctcaagaggctttggatttttatggtgaagttaggactagagacaaaaagggtgttaccatccccagccagagaaggtacgtatattattacagttatctgttgaaaaaccacttagactaccgtcccgttgcactgttattccacaagatgatgtttgaaacgatcccaatgttctctggtggaacttgtaaccctcaattcgttgtttgccagttaaaggttaaaatttatagctccaattcaggacccacaagacgggaagataaatttatgtactttgaatttccacaaccattgccagtctgtggtgatattaaggtagagtttttccataagcaaaacaaaatgttgaaaaaagacaaaatgttccacttctgggtgaataccttcttcattcctggaccagaggaaacgtccgaaaaagttgaaaacggctcattgtgtgatcaagagattgactccatctgttcaatcgagcgtgcagacaatgataaagagtacttggtgcttacattgaccaaaaatgatctggataaggctaacaaagacaaagccaatagatatttctcaccaaattttaaagttaagttgtatttcaccaagactgttgaggagccttccaatccagaagcatccagcagtacttcagttactccagacgtatctgacaatgagcctgaccattatcgttactctgatactactgactccgatcctgaaaacgaaccatttgatgaggaccagcacacccaaattacaaaagtttagggttaaggggcggccgctcaagaggatgtcagaatgccatttgcctgagagatgcaggcttcatttttgatacttttttatttgtaacctatatagtataggattttttttgtcattttgtttcttctcgtacgagcttgctcctgatcagcctatctcgcagcagatgaatatcttgtggtaggggtttgggaaaatcattcgagtttgatgtttttcttggtatttcccactcctcttcagagtacagaagattaagtgaaaccttcgtttgtgcggatccttcagtaatgtcttgtttcttttgttgcagtggtgagccattttgacttcgtgaaagtttctttagaatagttgtttccagaggccaaacattccacccgtagtaaagtgcaagcgtaggaagaccaagactggcataaatcaggtataagtgtcgagcactggcaggtgatcttctgaaagtttctactagcagataagatccagtagtcatgcatatggcaacaatgtaccgtgtggatctaagaacgcgtcctactaaccttcgcattcgttggtccagtttgttgttatcgatcaacgtgacaaggttgtcgattccgcgtaagcatgcatacccaaggacgcctgttgcaattccaagtgagccagttccaacaatctttgtaatattagagcacttcattgtgttgcgcttgaaagtaaaatgcgaacaaattaagagataatctcgaaaccgcgacttcaaacgccaatatgatgtgcggcacacaataagcgttcatatccgctgggtgactttctcgctttaaaaaattatccgaaaaaattttctagagtgttgttactttatacttccggctcgtataatacgacaaggtgtaaggaggactaaaccatggctaaactcacctctgctgttccagtcctgactgctcgtgatgttgctggtgctgttgagttctggactgatagactcggtttctcccgtgacttcgtagaggacgactttgccggtgttgtacgtgacgacgttaccctgttcatctccgcagttcaggaccaggttgtgccagacaacactctggcatgggtatgggttcgtggtctggacgaactgtacgctgagtggtctgaggtcgtgtctaccaacttccgtgatgcatctggtccagctatgaccgagatcggtgaacagccctggggtcgtgagtttgcactgcgtgatccagctggtaactgcgtgcatttcgtcgcagaagaacaggactaacaattgacaccttacgattatttagagagtatttattagttttattgtatgtatacggatgttttattatctatttatgcccttatattctgtaactatccaaaagtcctatcttatcaagccagcaatctatgtccgcgaacgtcaactaaaaataagctttttatgctgttctctctttttttcccttcggtataattataccttgcatccacagattctcctgccaaattttgcataatcctttacaacatggctatatgggagcacttagcgccctccaaaacccatattgcctacgcatgtataggtgttttttccacaatattttctctgtgctctctttttattaaagagaagctctatatcggagaagcttctgtggccgttatattcggccttatcgtgggaccacattgcctgaattggtttgccccggaagattggggaaacttggatctgattaccttagctgcaggtaccactgagcgtcagaccccgtagaaaagatcaaaggatcttcttgagatcctttttttctgcgcgtaatctgctgcttgcaaacaaaaaaaccaccgctaccagcggtggtttgtttgccggatcaagagctaccaactctttttccgaaggtaactggcttcagcagagcgcagataccaaatactgttcttctagtgtagccgtagttaggccaccacttcaagaactctgtagcaccgcctacatacctcgctctgctaatcctgttaccagtggctgctgccagtggcgataagtcgtgtcttaccgggttggactcaagacgatagttaccggataaggcgcagcggtcgggctgaacggggggttcgtgcacacagcccagcttggagcgaacgacctacaccgaactgagatacctacagcgtgagctatgagaaagcgccacgcttcccgaagggagaaaggcggacaggtatccggtaagcggcagggtcggaacaggagagcgcacgagggagcttccagggggaaacgcctggtatctttatagtcctgtcgggtttcgccacctctgacttgagcgtcgatttttgtgatgctcgtcaggggggcggagcctatggaaaaacgccagcaacgcggcctttttacggttcctggccttttgctggccttttgctcacatgttctttcctgcggtacccagatccaattcccgctttgactgcctgaaatctccatcgcctacaatgatgacatttggatttggttgactcatgttggtattgtgaaatagacgcagatcgggaacactgaaaaatacacagttattattcatttaaat

SEQ ID NO: 176 - DNA, 1755 bp, Homo sapiens
  source 1..1755: mol_type = genomic DNA
gatgcccacaagagcgaggtggcccaccgctttaaggacctgggcgaggagaacttcaaggccctggtgctgatcgcctttgcccagtacctgcagcagtgcccattcgaggatcacgtgaagctggtgaatgaggtgaccgagtttgccaagacatgcgtggccgacgagagcgccgagaactgtgataagtccctgcacaccctgttcggcgacaagctgtgcaccgtggccacactgcgggagacatatggcgagatggccgattgctgtgccaaacaggagcctgagagaaatgagtgctttctgcagcacaaggacgataacccaaatctgcctaggctggtgcggcccgaggtggacgtgatgtgcaccgcctttcacgataacgaggagacattcctgaagaagtatctgtacgagatcgcccggagacacccctatttctacgcccctgagctgctgtttttcgccaagagatacaaggccgcctttaccgagtgctgtcaggcagcagacaaggcagcatgcctgctgccaaagctggacgagctgagggatgagggcaaggccagctccgccaagcagagactgaagtgtgccagcctgcagaagtttggagagagggccttcaaggcctgggcagtggcaaggctgagccagcggttcccaaaggcagagttcgcagaggtgtccaagctggtgaccgatctgacaaaggtgcacaccgagtgctgtcacggcgacctgctggagtgcgcagacgatagggcagatctggccaagtacatctgtgagaaccaggactctatctctagcaagctgaaggagtgctgtgagaagcccctgctggagaagagccactgcatcgccgaggtggagaatgacgagatgcctgccgatctgccatctctggccgccgacttcgtggagagcaaggacgtgtgcaagaactatgccgaggccaaggacgtgtttctgggcatgttcctgtatgagtacgccaggcgccaccccgattattccgtggtgctgctgctgcggctggccaagacctacgagacaaccctggagaagtgctgtgccgccgccgacccccacgagtgctacgcaaaggtgtttgacgagttcaagccactggtggaggagccccagaacctgatcaagcagaattgtgagctgttcgagcagctgggcgagtataagtttcagaatgccctgctggtgagatacacaaagaaggtgcctcaggtgtccaccccaacactggtggaggtgtctaggaacctgggcaaggtcggcagcaagtgctgtaagcacccagaggcaaagaggatgccttgcgccgaggactatctgtctgtggtgctgaaccagctgtgcgtgctgcacgagaagacccccgtgagcgatcgggtgaccaagtgctgtacagagtctctggtgaatagacggccctgcttcagcgccctggaggtggacgagacatacgtgccaaaggagtttaacgccgagacattcaccttccacgccgacatctgtaccctgtccgagaaggagagacagatcaagaagcagacagccctggtggagctggtgaagcacaagcctaaggccaccaaggagcagctgaaggccgtgatggacgattttgccgccttcgtggagaagtgctgtaaggccgacgataaggagacatgcttcgccgaggagggcaagaagctggtcgccgcttcacaggctgctctggggctg

SEQ ID NO: 177 - DNA, 1752 bp, unidentified
  source 1..1752: mol_type = unassigned DNA
gatacccacaagagcgaggtggcccaccgctttaaggacctgggcgaggagcacttcaagggcctggtgctggtggccttttcccagtatctgcagcagtgccctttcgaggagcacgtgaagctggtgaatgaggtgaccgagtttgccaagacatgcgtggccgacgagagcgccgagaactgtgataagtccctgcacaccctgttcggcgacaagctgtgcaccgtggccacactgcgggagacatacggcgagatggccgattgctgtgccaagcaggagccagagagaaatgagtgctttctgcagcacaaggacgataacccaaatctgccacctctggtgcggcccgaggtggacgtgatgtgcaccgcctttcacgataacgaggccacattcctgaagaagtatctgtacgaggtggccaggcgccacccctatttctacgcccctgagctgctgtttttcgccgccagatataaggcagcctttgccgagtgctgtcaggcagcagacaaggcagcatgcctgctgccaaagctggacgagctgagggatgagggcaaggccagctccgccaagcagagactgaagtgtgcctccctgcagaagtttggcgacagggccttcaaggcctgggcagtggcaaggctgagccagaagtttcccaaggccgagttcgccgaggtgtccaagctggtgaccgatctgacaaaggtgcacaccgagtgctgtcacggcgacctgctggagtgcgcagacgatagggcagatctggccaagtacatgtgcgagaaccaggactctatctctagcaagctgaaggagtgctgtgataagcccctgctggagaagagccactgcctggccgaggtggagaatgacgagatgcctgccgatctgccatctctggccgccgactatgtggagagcaaggacgtgtgcaagaactacgccgaggccaaggacgtgtttctgggcatgttcctgtatgagtacgcccggagacaccccgattatagcgtgatgctgctgctgagactggccaaggcctacgaggccaccctggagaagtgctgtgcagcagccgatcctcacgagtgctacgcaaaggtgtttgacgagttccagccactggtggaggagccccagaacctggtgaagcagaattgtgagctgttcgagcagctgggcgagtataagtttcagaatgccctgctggtgaggtacaccaagaaggtgcctcaggtgtccaccccaacactggtggaggtgtctcgcaacctgggcaaggtcggcgccaagtgctgtaagctgcccgaggccaagaggatgccttgcgccgaggactatctgtctgtggtgctgaatcgcctgtgcgtgctgcacgagaagacacccgtgagcgagaaggtgaccaagtgctgtacagagtctctggtgaataggcgcccctgcttcagcgccctggagctggacgaggcctacgtgcctaaggcctttaacgccgagacattcaccttccacgccgatatgtgcaccctgagcgagaaggagaagcaggtgaagaagcagacagccctggtggagctggtgaagcacaagcctaaggccaccaaggagcagctgaagggcgtgatggataactttgccgccttcgtggagaagtgctgtaaggccgacgataaggaggcctgcttcgccgaggagggacccaagtttgtcgccgcatcacaggcagcactggca

SEQ ID NO: 178 - DNA, 1752 bp, Rattus sp.
  source 1..1752: mol_type = genomic DNA
gaggctcacaagtccgagatcgcccacaggttcaaggacctgggagagcagcacttcaagggcctggtgctgatcgccttttctcagtacctgcagaagtgcccctacgaggagcacatcaagctggtgcaggaggtgaccgatttcgctaagacatgcgtggctgacgagaacgccgagaactgtgataagagcatccacacactgtttggagacaagctgtgcgccatccccaagctgagggacaactacggcgagctggctgattgctgtgccaagcaggagcctgagagaaacgagtgcttcctgcagcacaaggacgataaccccaacctgccaccttttcagcggcctgaggctgaggctatgtgcacctcttttcaggagaaccctacaagcttcctgggacactacctgcacgaggtggctcggcgccacccttacttctacgctccagagctgctgtactacgctgagaagtacaacgaggtgctgacccagtgctgtacagagagcgacaaggctgcctgcctgacccccaagctggatgctgtgaaggagaaggccctggtggctgccgtgcggcagcgcatgaagtgttctagcatgcagaggtttggagagagagccttcaaggcttgggctgtggctaggatgtcccagaggttccctaacgctgagttcgccgagatcaccaagctggccaccgacgtgacaaagatcaacaaggagtgctgtcacggcgatctgctggagtgcgctgacgatagagctgagctggccaagtacatgtgcgagaaccaggccacaatctcctctaagctgcaggcttgctgtgacaagccagtgctgcagaagagccagtgcctggccgagatcgagcacgacaacatcccagctgatctgccctccatcgctgccgacttcgtggaggataaggaggtgtgcaagaactacgctgaggccaaggacgtgttcctgggcaccttcctgtacgagtacagcaggagacaccccgactatagcgtgtccctgctgctgaggctggctaagaagtacgaggccaccctggagaagtgctgtgctgagggcgaccccccagcttgctacggaacagtgctggctgagttccagccactggtggaggagcctaagaacctggtgaagaccaactgtgagctgtacgagaagctgggagagtacggctttcagaacgccgtgctggtgagatacacacagaaggctccacaggtgtccacccccacactggtggaggctgccaggaacctgggaagagtgggcaccaagtgctgtacactgcctgaggctcagcggctgccatgcgtggaggattacctgtctgctatcctgaaccgcctgtgcgtgctgcacgagaagacccccgtgagcgagaaggtgacaaagtgctgttctggaagcctggtggagcggcgcccatgcttctccgccctgaccgtggacgagacatacgtgcccaaggagtttaaggctgagacattcaccttccactctgacatctgtaccctgccagataaggagaagcagatcaagaagcagacagctctggccgagctggtgaagcacaagcccaaggccaccgaggaccagctgaagacagtgatgggcgactttgctcagttcgtggataagtgctgtaaggctgccgacaaggataactgtttcgccaccgaaggtccaaatctcgtcgcccgctccaaagaagcactggct

SEQ ID NO: 179 - DNA, 1752 bp, Mus sp.
  source 1..1752: mol_type = genomic DNA
gaggctcacaaaagcgagattgcccatagatacaacgacctgggggaacagcatttcaagggactggtcctgattgcattttcacagtacctgcagaagtgcagctatgacgagcacgccaagctggtgcaggaggtgaccgatttcgccaagacatgcgtggcagacgagtccgccgcaaactgtgataagtctctgcacaccctgtttggcgacaagctgtgcgccatccccaacctgcgggagaattatggcgagctggccgattgctgtacaaagcaggagcctgagcgcaacgagtgcttcctgcagcacaaggacgataatccaagcctgccaccttttgagcggcccgaggcagaggcaatgtgcacctccttcaaggagaacccaaccaccttcatgggccactacctgcacgaggtggccaggagacacccctacttctatgcccctgagctgctgtactatgccgagcagtataatgagatcctgacccagtgctgtgccgaggccgacaaggagagctgcctgacacctaagctggatggcgtgaaggagaaggccctggtgagctccgtgcggcagcgcatgaagtgttctagcatgcagaagttcggcgagagggcctttaaggcatgggcagtggcaaggctgtcccagaccttcccaaacgccgactttgccgagatcacaaagctggccaccgatctgacaaaagtgaataaggagtgctgtcacggcgacctgctggagtgcgcagacgatagggcagagctggccaagtatatgtgcgagaaccaggccaccatctcctctaagctgcagacatgctgtgataagcccctgctgaagaaggcccactgcctgtctgaggtggagcacgacaccatgcctgcagatctgccagcaatcgcagcagacttcgtggaggatcaggaggtgtgcaagaactacgccgaggccaaggacgtgttcctgggcacctttctgtacgagtattcccggcgccaccctgattacagcgtgtccctgctgctgaggctggccaagaagtatgaggccaccctggagaagtgctgtgcagaggcaaatccaccagcatgctacggaacagtgctggcagagttccagccactggtggaggagcccaagaacctggtgaagaccaattgtgacctgtacgagaagctgggcgagtatggctttcagaacgccatcctggtgagatatacacagaaggcccctcaggtgtccaccccaacactggtggaggccgccaggaatctgggcagagtgggcaccaagtgctgtacactgcccgaggaccagaggctgccttgcgtggaggattacctgtctgccatcctgaatagggtgtgcctgctgcacgagaagacccctgtgagcgagcacgtgacaaagtgctgttctggcagcctggtggagaggaggccctgcttctccgccctgaccgtggacgagacatacgtgccaaaggagtttaaggccgagactttcacgtttcactctgatatctgtaccctgccagagaaggagaagcagatcaagaagcagacagccctggccgagctggtgaagcacaagcccaaggccaccgccgagcagctgaagacagtgatggacgatttcgcccagtttctggacacctgctgtaaggccgccgataaggacacctgtttctccactgaggggcctaatctggtcacacgctgtaaagacgcactggca

SEQ ID NO: 180 - DNA, 72 bp, Homo sapiens
  source 1..72: mol_type = genomic DNA
atgaagtgggtgacctttattagcctgctgttcctgtttagttccgcatactcaagaggggtgtttagaaga

SEQ ID NO: 181 - DNA, 72 bp, unidentified; identical to SEQ ID NO: 180
  source 1..72: mol_type = unassigned DNA

SEQ ID NO: 182 - DNA, 72 bp, Rattus sp.
  source 1..72: mol_type = genomic DNA
atgaaatgggtcaccttcctcctcctgctgttcatctctggttccgcctttagccggggggtcttccgacgg

SEQ ID NO: 183 - DNA, 72 bp, Mus sp.
  source 1..72: mol_type = genomic DNA
atgaaatgggtcaccttcctcctcctgctgttcgtgtctggttccgcctttagccggggggtcttccgacgg

SEQ ID NO: 184 - DNA, 66 bp, Mus sp.
  source 1..66: mol_type = genomic DNA
atgaggagaaaccagctgcccacccctgccttcctgctgctgtttctgctgctgccaagggacgct

SEQ ID NO: 185 - DNA, 57 bp, Mus sp.
  source 1..57: mol_type = genomic DNA
atgctgtctctgagggtgacctgcctgatcctgagcgtggcctccaccgtgtggaca

SEQ ID NO: 186 - DNA, 72 bp, Mus sp.
  source 1..72: mol_type = genomic DNA
atgaccccaagcatctcctggggactgctgctgctggctggactgtgctgtctggtgccttctttcctggct

SEQ ID NO: 187 - DNA, 60 bp, Mus sp.
  source 1..60: mol_type = genomic DNA
atggagaccgacacactgctgctgtgggtgctgctgctgtgggtgccaggcagcaccgga

SEQ ID NO: 188 - DNA, 57 bp, synthetic construct
  source 1..57: mol_type = other DNA
atggagtttgggctgtcatgggtgttcctggtcgcaatcctgaaaggcgtgcagtgt

SEQ ID NO: 189 - DNA, 60 bp, Homo sapiens
  source 1..60: mol_type = genomic DNA
atggtgctgcagacccaggtgttcatcagcctgctgctgtggatctccggcgcctacgga

SEQ ID NO: 190 - DNA, 48 bp, Homo sapiens
  source 1..48: mol_type = genomic DNA
atgcccctgctgctgctgctgcctctgctgtgggccggcgctctggcc

SEQ ID NO: 191 - DNA, 63 bp, synthetic construct
  source 1..63: mol_type = other DNA
atgtggtggaggctgtggtggctcctcctgctgctgctgctgctgtggcccatggtgtgggcc

SEQ ID NO: 192 - DNA, 69 bp, synthetic construct
  source 1..69: mol_type = other DNA
atgtggtggaggctgtggtggctcctcctgctgctgctgctgctgtggcccatggtgtgggccgctgcc

SEQ ID NO: 193 - DNA, 456 bp, Homo sapiens
  source 1..456: mol_type = genomic DNA
agcgagagccctgtgaccatctccagggccggaaatgcaggagagctggtgtctcctctgctgctgccacctacacggagaaggcgccggagacacatccagggaccaggacctgtgctgaacctgccaagcgccgccgccgccccacccgtggccagagccccagaggcagcaggaggaggctccagatctgaggactatagctcctctccacacagcgccgccgccgccgcccggcccctggccgccgaggagaagcaggcccagtctctgcagcccagctcctctaggcgcagctcccactaccctgcagcagtgcagtcccaggctgccgccgagaggggagcctctgccaccgcaaagtctcgcgccatcagcatcctgcagaagaagccacgccaccagcagctgctgccctctctgtctagcttctttttcagccaccggctgcccgac

SEQ ID NO: 194 - DNA, 438 bp, Homo sapiens
  source 1..438: mol_type = genomic DNA
atctccagggccggaaatgcaggagagctggtgtctcctctgctgctgccacctacacggagaaggcgccggagacacatccagggaccaggacctgtgctgaacctgccaagcgccgccgccgccccacccgtggccagagccccagaggcagcaggaggaggctccagatctgaggactatagctcctctccacacagcgccgccgccgccgcccggcccctggccgccgaggagaagcaggcccagtctctgcagcccagctcctctaggcgcagctcccactaccctgcagcagtgcagtcccaggctgccgccgagaggggagcctctgccaccgcaaagtctcgcgccatcagcatcctgcagaagaagccacgccaccagcagctgctgccctctctgtctagcttctttttcagccaccggctgcccgac

SEQ ID NO: 195 - DNA, 393 bp, Homo sapiens
  source 1..393: mol_type = genomic DNA
ctgccacctacacggagaaggcgccggagacacatccagggaccaggacctgtgctgaacctgccaagcgccgccgccgccccacccgtggccagagccccagaggcagcaggaggaggctccagatctgaggactatagctcctctccacacagcgccgccgccgccgcccggcccctggccgccgaggagaagcaggcccagtctctgcagcccagctcctctaggcgcagctcccactaccctgcagcagtgcagtcccaggctgccgccgagaggggagcctctgccaccgcaaagtctcgcgccatcagcatcctgcagaagaagccacgccaccagcagctgctgccctctctgtctagcttctttttcagccaccggctgcccgac

SEQ ID NO: 196 - DNA, 216 bp, Homo sapiens
  source 1..216: mol_type = genomic DNA
ctggccgccgaggagaagcaggcccagtctctgcagcccagctcctctaggcgcagctcccactaccctgcagcagtgcagtcccaggctgccgccgagaggggagcctctgccaccgcaaagtctcgcgccatcagcatcctgcagaagaagccacgccaccagcagctgctgccctctctgtctagcttctttttcagccaccggctgcccgac

SEQ ID NO: 197 - DNA, 1029 bp, unidentified
  source 1..1029: mol_type = unassigned DNA
atcgtgagccgcaataagaggcgctatcaggaggatggcttcgacctggatctgacatatatctacccaaacatcatcgccatgggatttccagcagagaggctggagggcgtgtacaggaacaatatcgacgatgtggtgaggttcctggactccaagcacaagaaccactataagatctacaatctgtgcgccgagcggcactatgataccgccaagttcaactgtagagtggcccagtacccatttgaggaccacaatccaccccagctggagctgatcaagcccttttgcgaggacctggatcagtggctgagcgaggacgataatcacgtggcagcaatccactgcaaggcaggcaagggaaggacaggcgtgatgatctgtgcctatctgctgcacaggggcaagttcctgaaggcccaggaggccctggacttttacggcgaggtgcggaccagagataagaagggcgtgacaatccctagccagcggcggtacgtgtactattactcctacctgctgaagaaccacctggactaccgcccagtggccctgctgtttcacaagatgatgttcgagacaatccctatgttctccggcggcacatgcaacccacagtttgtggtgtgccagctgaaggtgaagatctatagctccaattctggccccaccaggcgcgaggataagttcatgtactttgagttcccccagcctctgccagtgtgcggcgacatcaaggtggagtttttccacaagcagaacaagatgctgaagaaggataagatgtttcacttctgggtgaatacctttttcatccccggccctgaggagacaagcgagaaggtggagaatggctccctgtgcgaccaggagatcgattctatctgtagcatcgagagggccgacaacgataaggagtacctggtgctgaccctgacaaagaatgacctggataaggccaacaaggacaaggccaatcgctatttttctcccaacttcaaggtgaagctgtacttcaccaagaca

SEQ ID NO: 198 - DNA, 1647 bp, Homo sapiens
  source 1..1647: mol_type = genomic DNA
atctccagggccggaaatgcaggagagctggtgtctcctctgctgctgccacctacacggagaaggcgccggagacacatccagggaccaggacctgtgctgaacctgccaagcgccgccgccgccccacccgtggccagagccccagaggcagcaggaggaggctccagatctgaggactatagctcctctccacacagcgccgccgccgccgcccggcccctggccgccgaggagaagcaggcccagtctctgcagcccagctcctctaggcgcagctcccactaccctgcagcagtgcagtcccaggctgccgccgagaggggagcctctgccaccgcaaagtctcgcgccatcagcatcctgcagaagaagccacgccaccagcagctgctgccctctctgtctagcttctttttcagccaccggctgcccgacatgaccgccatcatcaaggagatcgtgagcagaaataagcggcggtaccaggaggatggcttcgacctggatctgacatatatctaccccaacatcatcgccatgggatttcctgcagagcggctggagggcgtgtacagaaacaatatcgacgatgtggtgaggttcctggactccaagcacaagaaccactataagatctacaatctgtgcgccgagaggcactatgataccgccaagttcaactgtcgcgtggcccagtacccctttgaggaccacaatcctccacagctggagctgatcaagcctttctgcgaggacctggatcagtggctgtccgaggacgataatcacgtggcagcaatccactgcaaggcaggcaagggcaggacaggcgtgatgatctgtgcctatctgctgcaccgcggcaagttcctgaaggcccaggaggccctggacttttacggcgaggtgaggacccgcgataagaagggcgtgacaatcccaagccagcggcggtacgtgtactattactcctacctgctgaagaaccacctggactacaggccagtggccctgctgtttcacaagatgatgttcgagacaatccctatgttctccggcggcacatgcaacccacagtttgtggtgtgccagctgaaggtgaagatctattcctctaattctggcccaacccggagagaggataagttcatgtactttgagttcccacagccactgcccgtgtgcggcgacatcaaggtggagtttttccacaagcagaacaagatgctgaagaaggataagatgtttcacttctgggtgaatacctttttcatcccaggccccgaggagacatccgagaaggtggagaatggctctctgtgcgaccaggagatcgatagcatctgttccatcgagcgggccgacaacgataaggagtacctggtgctgaccctgacaaagaatgacctggataaggccaacaaggacaaggccaatagatacttcagccccaacttcaaggtgaagctgtacttcaccaagacagtggaggagccttccaatccagaggccagctcctctaccagcgtgacacctgacgtgtccgataacgagccagaccactatcggtactccgataccacagactctgatccagagaacgagccctttgacgaggatcagcacacccagatcacaaaggtg

SEQ ID NO: 199 - DNA, 1602 bp, Homo sapiens
  source 1..1602: mol_type = genomic DNA
ctgccacctacacggagaaggcgccggagacacatccagggaccaggacctgtgctgaacctgccaagcgccgccgccgccccacccgtggccagagccccagaggcagcaggaggaggctccagatctgaggactatagctcctctccacacagcgccgccgccgccgcccggcccctggccgccgaggagaagcaggcccagtctctgcagcccagctcctctaggcgcagctcccactaccctgcagcagtgcagtcccaggctgccgccgagaggggagcctctgccaccgcaaagtctcgcgccatcagcatcctgcagaagaagccacgccaccagcagctgctgccctctctgtctagcttctttttcagccaccggctgcccgacatgaccgccatcatcaaggagatcgtgagcagaaataagcggcggtaccaggaggatggcttcgacctggatctgacatatatctaccccaacatcatcgccatgggatttcctgcagagcggctggagggcgtgtacagaaacaatatcgacgatgtggtgaggttcctggactccaagcacaagaaccactataagatctacaatctgtgcgccgagaggcactatgataccgccaagttcaactgtcgcgtggcccagtacccctttgaggaccacaatcctccacagctggagctgatcaagcctttctgcgaggacctggatcagtggctgtccgaggacgataatcacgtggcagcaatccactgcaaggcaggcaagggcaggacaggcgtgatgatctgtgcctatctgctgcaccgcggcaagttcctgaaggcccaggaggccctggacttttacggcgaggtgaggacccgcgataagaagggcgtgacaatcccaagccagcggcggtacgtgtactattactcctacctgctgaagaaccacctggactacaggccagtggccctgctgtttcacaagatgatgttcgagacaatccctatgttctccggcggcacatgcaacccacagtttgtggtgtgccagctgaaggtgaagatctattcctctaattctggcccaacccggagagaggataagttcatgtactttgagttcccacagccactgcccgtgtgcggcgacatcaaggtggagtttttccacaagcagaacaagatgctgaagaaggataagatgtttcacttctgggtgaatacctttttcatcccaggccccgaggagacatccgagaaggtggagaatggctctctgtgcgaccaggagatcgatagcatctgttccatcgagcgggccgacaacgataaggagtacctggtgctgaccctgacaaagaatgacctggataaggccaacaaggacaaggccaatagatacttcagccccaacttcaaggtgaagctgtacttcaccaagacagtggaggagccttccaatccagaggccagctcctctaccagcgtgacacctgacgtgtccgataacgagccagaccactatcggtactccgataccacagactctgatccagagaacgagccctttgacgaggatcagcacacccagatcacaaaggtg

SEQ ID NO: 200 - DNA, 1425 bp, Homo sapiens
  source 1..1425: mol_type = genomic DNA
ctggccgccgaggagaagcaggcccagtctctgcagcccagctcctctaggcgcagctcccactaccctgcagcagtgcagtcccaggctgccgccgagaggggagcctctgccaccgcaaagtctcgcgccatcagcatcctgcagaagaagccacgccaccagcagctgctgccctctctgtctagcttctttttcagccaccggctgcccgacatgaccgccatcatcaaggagatcgtgagcagaaataagcggcggtaccaggaggatggcttcgacctggatctgacatatatctaccccaacatcatcgccatgggatttcctgcagagcggctggagggcgtgtacagaaacaatatcgacgatgtggtgaggttcctggactccaagcacaagaaccactataagatctacaatctgtgcgccgagaggcactatgataccgccaagttcaactgtcgcgtggcccagtacccctttgaggaccacaatcctccacagctggagctgatcaagcctttctgcgaggacctggatcagtggctgtccgaggacgataatcacgtggcagcaatccactgcaaggcaggcaagggcaggacaggcgtgatgatctgtgcctatctgctgcaccgcggcaagttcctgaaggcccaggaggccctggacttttacggcgaggtgaggacccgcgataagaagggcgtgacaatcccaagccagcggcggtacgtgtactattactcctacctgctgaagaaccacctggactacaggccagtggccctgctgtttcacaagatgatgttcgagacaatccctatgttctccggcggcacatgcaacccacagtttgtggtgtgccagctgaaggtgaagatctattcctctaattctggcccaacccggagagaggataagttcatgtactttgagttcccacagccactgcccgtgtgcggcgacatcaaggtggagtttttccacaagcagaacaagatgctgaagaaggataagatgtttcacttctgggtgaatacctttttcatcccaggccccgaggagacatccgagaaggtggagaatggctctctgtgcgaccaggagatcgatagcatctgttccatcgagcgggccgacaacgataaggagtacctggtgctgaccctgacaaagaatgacctggataaggccaacaaggacaaggccaatagatacttcagccccaacttcaaggtgaagctgtacttcaccaagacagtggaggagccttccaatccagaggccagctcctctaccagcgtgacacctgacgtgtccgataacgagccagaccactatcggtactccgataccacagactctgatccagagaacgagccctttgacgaggatcagcacacccagatcacaaaggtg

SEQ ID NO: 201 - protein, 549 aa, Mus sp.
IARAGNAGELLSPLLLPPTRRRRRRHVQGPGPVLSLPSAAAAPPLARAPEAAGGGSRCEDYPSSPHSAASAARPLAAEEKQAQSLQPSSSRRSSHYPAAVQGQAAAERGASATAKSRAISILQKKPRHQQLLPSLSSFFFSHRLPDMTAIIKEIVSRNKRRYQEDGFDLDLTYIYPNIIAMGFPAERLEGVYRNNIDDVVRFLDSKHKNHYKIYNLCAERHYDTAKFNCRVAQYPFEDHNPPQLELIKPFCEDLDQWLSEDDNHVAAIHCKAGKGRTGVMICAYLLHRGKFLKAQEALDFYGEVRTRDKKGVTIPSQRRYVYYYSYLLKNHLDYRPVALLFHKMMFETIPMFSGGTCNPQFVVCQLKVKIYSSNSGPTRREDKFMYFEFPQPLPVCGDIKVEFFHKQNKMLKKDKMFHFWVNTFFIPGPEETSEKVENGSLCDQEIDSICSIERADNDKEYLVLTLTKNDLDKANKDKANRYFSPNFKVKLYFTKTVEEPSNPEASSSTSVTPDVSDNEPDHYRYSDTTDSDPENEPFDEDQHSQITKV

SEQ ID NO: 202 - protein, 534 aa, Mus sp.
LPPTRRRRRRHVQGPGPVLSLPSAAAAPPLARAPEAAGGGSRCEDYPSSPHSAASAARPLAAEEKQAQSLQPSSSRRSSHYPAAVQGQAAAERGASATAKSRAISILQKKPRHQQLLPSLSSFFFSHRLPDMTAIIKEIVSRNKRRYQEDGFDLDLTYIYPNIIAMGFPAERLEGVYRNNIDDVVRFLDSKHKNHYKIYNLCAERHYDTAKFNCRVAQYPFEDHNPPQLELIKPFCEDLDQWLSEDDNHVAAIHCKAGKGRTGVMICAYLLHRGKFLKAQEALDFYGEVRTRDKKGVTIPSQRRYVYYYSYLLKNHLDYRPVALLFHKMMFETIPMFSGGTCNPQFVVCQLKVKIYSSNSGPTRREDKFMYFEFPQPLPVCGDIKVEFFHKQNKMLKKDKMFHFWVNTFFIPGPEETSEKVENGSLCDQEIDSICSIERADNDKEYLVLTLTKNDLDKANKDKANRYFSPNFKVKLYFTKTVEEPSNPEASSSTSVTPDVSDNEPDHYRYSDTTDSDPENEPFDEDQHSQITKV

SEQ ID NO: 203 - protein, 475 aa, Mus sp.
LAAEEKQAQSLQPSSSRRSSHYPAAVQGQAAAERGASATAKSRAISILQKKPRHQQLLPSLSSFFFSHRLPDMTAIIKEIVSRNKRRYQEDGFDLDLTYIYPNIIAMGFPAERLEGVYRNNIDDVVRFLDSKHKNHYKIYNLCAERHYDTAKFNCRVAQYPFEDHNPPQLELIKPFCEDLDQWLSEDDNHVAAIHCKAGKGRTGVMICAYLLHRGKFLKAQEALDFYGEVRTRDKKGVTIPSQRRYVYYYSYLLKNHLDYRPVALLFHKMMFETIPMFSGGTCNPQFVVCQLKVKIYSSNSGPTRREDKFMYFEFPQPLPVCGDIKVEFFHKQNKMLKKDKMFHFWVNTFFIPGPEETSEKVENGSLCDQEIDSICSIERADNDKEYLVLTLTKNDLDKANKDKANRYFSPNFKVKLYFTKTVEEPSNPEASSSTSVTPDVSDNEPDHYRYSDTTDSDPENEPFDEDQHSQITKV

SEQ ID NO: 204 - DNA, 1647 bp, Mus sp.
  source 1..1647: mol_type = genomic DNA
atcgctagggctggaaacgctggagagctgctgtcccctctgctgctgccccctacaaggagacggcgcaggagacacgtgcagggacctggaccagtgctgtccctgccatctgccgctgctgctccaccactggctagggctcctgaggccgctggcggaggctctcgctgcgaggactacccaagctccccacacagcgccgcttccgccgctcggccactggctgctgaggagaagcaggctcagagcctgcagccttctagctcccggcgctctagccactacccagctgctgtgcagggacaggctgctgctgagaggggagcttccgccaccgctaagtccagagccatctctatcctgcagaagaagccaaggcaccagcagctgctgccttccctgtcctctttctttttctctcacaggctgcctgatatgaccgccatcatcaaggagatcgtgagcagaaacaagaggagataccaggaggacggcttcgacctggatctgacatacatctaccctaacatcatcgctatgggatttccagctgagcggctggagggcgtgtacaggaacaacatcgacgatgtggtgcggttcctggactccaagcacaagaaccactacaagatctacaacctgtgcgctgagaggcactacgacaccgccaagttcaactgtagagtggctcagtacccttttgaggatcacaaccctccacagctggagctgatcaagccattctgcgaggacctggatcagtggctgagcgaggacgataaccacgtggctgccatccactgcaaggccggaaagggccggacaggagtgatgatctgtgcttacctgctgcaccgcggcaagttcctgaaggctcaggaggccctggacttttacggagaggtgaggaccagagataagaagggcgtgacaatcccttcccagcggcgctacgtgtactactactcttacctgctgaagaaccacctggactaccgcccagtggccctgctgtttcacaagatgatgttcgagacaatcccaatgttctctggaggcacatgcaacccccagtttgtggtgtgccagctgaaggtgaagatctacagctccaacagcggaccaaccaggagagaggacaagttcatgtactttgagttcccacagcctctgcccgtgtgcggcgatatcaaggtggagtttttccacaagcagaacaagatgctgaagaaggacaagatgtttcacttctgggtcaacacctttttcatccccggacctgaggagacaagcgagaaggtggagaacggctccctgtgcgaccaggagatcgattctatctgtagcatcgagcgggccgacaacgataaggagtacctggtgctgaccctgacaaagaacgacctggataaggctaacaaggataaggccaaccgctacttttcccccaacttcaaggtgaagctgtacttcaccaagacagtggaggagccttctaacccagaggcctctagctccacctctgtgacaccagacgtgagcgataacgagcccgaccactacaggtacagcgataccacagactccgatcccgagaacgagccttttgacgaggatcagcacagccagatcaccaaggtg

SEQ ID NO: 205 - DNA, 1602 bp, Mus sp.
  source 1..1602: mol_type = genomic DNA
ctgccccctacaaggagacggcgcaggagacacgtgcagggacctggaccagtgctgtccctgccatctgccgctgctgctccaccactggctagggctcctgaggccgctggcggaggctctcgctgcgaggactacccaagctccccacacagcgccgcttccgccgctcggccactggctgctgaggagaagcaggctcagagcctgcagccttctagctcccggcgctctagccactacccagctgctgtgcagggacaggctgctgctgagaggggagcttccgccaccgctaagtccagagccatctctatcctgcagaagaagccaaggcaccagcagctgctgccttccctgtcctctttctttttctctcacaggctgcctgatatgaccgccatcatcaaggagatcgtgagcagaaacaagaggagataccaggaggacggcttcgacctggatctgacatacatctaccctaacatcatcgctatgggatttccagctgagcggctggagggcgtgtacaggaacaacatcgacgatgtggtgcggttcctggactccaagcacaagaaccactacaagatctacaacctgtgcgctgagaggcactacgacaccgccaagttcaactgtagagtggctcagtacccttttgaggatcacaaccctccacagctggagctgatcaagccattctgcgaggacctggatcagtggctgagcgaggacgataaccacgtggctgccatccactgcaaggccggaaagggccggacaggagtgatgatctgtgcttacctgctgcaccgcggcaagttcctgaaggctcaggaggccctggacttttacggagaggtgaggaccagagataagaagggcgtgacaatcccttcccagcggcgctacgtgtactactactcttacctgctgaagaaccacctggactaccgcccagtggccctgctgtttcacaagatgatgttcgagacaatcccaatgttctctggaggcacatgcaacccccagtttgtggtgtgccagctgaaggtgaagatctacagctccaacagcggaccaaccaggagagaggacaagttcatgtactttgagttcccacagcctctgcccgtgtgcggcgatatcaaggtggagtttttccacaagcagaacaagatgctgaagaaggacaagatgtttcacttctgggtcaacacctttttcatccccggacctgaggagacaagcgagaaggtggagaacggctccctgtgcgaccaggagatcgattctatctgtagcatcgagcgggccgacaacgataaggagtacctggtgctgaccctgacaaagaacgacctggataaggctaacaaggataaggccaaccgctacttttcccccaacttcaaggtgaagctgtacttcaccaagacagtggaggagccttctaacccagaggcctctagctccacctctgtgacaccagacgtgagcgataacgagcccgaccactacaggtacagcgataccacagactccgatcccgagaacgagccttttgacgaggatcagcacagccagatcaccaaggtg

SEQ ID NO: 206 - DNA, 1425 bp, Mus sp.
  source 1..1425: mol_type = genomic DNA
ctggctgctgaggagaagcaggctcagagcctgcagccttctagctcccggcgctctagccactacccagctgctgtgcagggacaggctgctgctgagaggggagcttccgccaccgctaagtccagagccatctctatcctgcagaagaagccaaggcaccagcagctgctgccttccctgtcctctttctttttctctcacaggctgcctgatatgaccgccatcatcaaggagatcgtgagcagaaacaagaggagataccaggaggacggcttcgacctggatctgacatacatctaccctaacatcatcgctatgggatttccagctgagcggctggagggcgtgtacaggaacaacatcgacgatgtggtgcggttcctggactccaagcacaagaaccactacaagatctacaacctgtgcgctgagaggcactacgacaccgccaagttcaactgtagagtggctcagtacccttttgaggatcacaaccctccacagctggagctgatcaagccattctgcgaggacctggatcagtggctgagcgaggacgataaccacgtggctgccatccactgcaaggccggaaagggccggacaggagtgatgatctgtgcttacctgctgcaccgcggcaagttcctgaaggctcaggaggccctggacttttacggagaggtgaggaccagagataagaagggcgtgacaatcccttcccagcggcgctacgtgtactactactcttacctgctgaagaaccacctggactaccgcccagtggccctgctgtttcacaagatgatgttcgagacaatcccaatgttctctggaggcacatgcaacccccagtttgtggtgtgccagctgaaggtgaagatctacagctccaacagcggaccaaccaggagagaggacaagttcatgtactttgagttcccacagcctctgcccgtgtgcggcgatatcaaggtggagtttttccacaagcagaacaagatgctgaagaaggacaagatgtttcacttctgggtcaacacctttttcatccccggacctgaggagacaagcgagaaggtggagaacggctccctgtgcgaccaggagatcgattctatctgtagcatcgagcgggccgacaacgataaggagtacctggtgctgaccctgacaaagaacgacctggataaggctaacaaggataaggccaaccgctacttttcccccaacttcaaggtgaagctgtacttcaccaagacagtggaggagccttctaacccagaggcctctagctccacctctgtgacaccagacgtgagcgataacgagcccgaccactacaggtacagcgataccacagactccgatcccgagaacgagccttttgacgaggatcagcacagccagatcaccaaggtg

SEQ ID NO: 207 - DNA, 49 bp, synthetic construct
  source 1..49: mol_type = other DNA
gtcgtatccagtgcagggtccgaggtattcgcactggatacgactcaac

SEQ ID NO: 208 - DNA, 22 bp, synthetic construct
  source 1..22: mol_type = other DNA
gcggcggtagcttatcagactg

SEQ ID NO: 209 - DNA, 20 bp, synthetic construct
  source 1..20: mol_type = other DNA
atccagtgcagggtccgagg

SEQ ID NO: 210 - DNA, 33477 bp, synthetic construct
  source 1..33477: mol_type = other DNA
gcttccatcaaacgagttggtgctcatggcggcggcggctgctgcaaaacagatacaaaactacataagacccccaccttatatattctttcccacccttaagctagtttcgaaatcgattctagtttcgaagctgtcgaagaattcgtagctagacaggtggcacttttcggggaaatgtgcgcggaacccctatttgtttatttttctaaatacattcaaatatgtatccgctcatgagacaataaccctgataaatgcttcaataatattgaaaaaggaagagtatgagtattcaacatttccgtgtcgcccttattcccttttttgcggcattttgccttcctgtttttgctcacccagaaacgctggtgaaagtaaaagatgctgaagatcagttgggtgcacgagtgggttacatcgaactggatctcaacagcggtaagatccttgagagttttcgccccgaagaacgttttccaatgatgagcacttttaaagttctgctatgtggcgcggtattatcccgtgttgacgccgggcaagagcaactcggtcgccgcatacactattctcagaatgacttggttgagtactcaccagtcacagaaaagcatcttacggatggcatgacagtaagagaattatgcagtgctgccataaccatgagtgataacactgcggccaacttacttctgacaacgatcggaggaccgaaggagctaaccgcttttttgcacaacatgggggatcatgtaactcgccttgatcgttgggaaccggagctgaatgaagccataccaaacgacgagcgtgacaccacgatgcctgcagcaatggcaacaacgttgcgcaaactattaactggcgaactacttactctagcttcccggcaacaattaatagactggatggaggcggataaagttgcaggaccacttctgcgctcggcccttccggctggctggtttattgctgataaatctggagccggtgagcgtgggtctcgcggtatcattgcagcactggggccagatggtaagccctcccgtatcgtagttatctacacgacggggagtcaggcaactatggatgaacgaaatagacagatcgctgagataggtgcctcactgattaagcattggtaactgtcagaccaagtttactcatatatactttagattgatttaaaacttcatttttaatttaaaaggatctaggtgaagatcctttttgataatctcatgaccaaaatcccttaacgtgagttttcgttccactgagcgtcagaccccgtagaaaagatcaaaggatcttcttgagatcctttttttctgcgcgtaatctgctgcttgcaaacaaaaaaaccaccgctaccagcggtggtttgtttgccggatcaagagctaccaactctttttccgaaggtaactggcttcagcagagcgcagataccaaatactgtccttctagtgtagccgtagttaggccaccacttcaagaactctgtagcaccgcctacatacctcgctctgctaatcctgttaccagtggctgctgccagtggcgataagtcgtgtcttaccgggttggactcaagacgatagttaccggataaggcgcagcggtcgggctgaacggggggttcgtgcacacagcccagcttggagcgaacgacctacaccgaactgagatacctacagcgtgagctatgagaaagcgccacgcttcccgaagggagaaaggcggacaggtatccggtaagcggcagggtcggaacaggagagcgcacgagggagcttccagggggaaacgcctggtatctttatagtcctgtcgggtttcgccacctctgacttgagcgtcgatttttgtgatgctcgtcaggggggcggagcctatggaaaaacgccagcaacgcggcctttttacggttcctggccttttgctggccttttgctcacatgttctttcctgcgttatcccctgattctgtggataaccgtattaccgcctttgagtgagctgataccgctcgccgcagccgaacgaccgagcgcagcgagtcagtgagcgaggaagcggaagagcgcctgatgcggtattttctccttacgcatctgtgcggtatttcacaccgcatatggtgcactctcagtacaatctgctctgatgccgcatagttaagccagtatacactccgctatcgctacgtgactgggtcatggctgcgccccgacacccgccaacacccgctgacgcgccctgacgggcttgtctgctcccggcatccgcttacagacaagctgtgaccgtctccgggagctgcatgtgtcagaggttttcaccgtcatcaccgaaacgcgcgaggcagctgcggtaaagctcatcagcgtggtcgtgaagcgattcacagatgtctgcctgttcatccgcgtccagctcgttgagtttctccagaagcgttaatgtctggcttctgataaagcgggccatgttaagggcggttttttcctgtttggtcactgatgcctccgtgtaagggggatttctgttcatgggggtaatgataccgatgaaacgagagaggatgctcacgatacgggttactgatgatgaacatgcccggttactggaacgttgtgagggtaaacaactggcggtatggatgcggcgggaccagagaaaaatcactcagggtcaatgccagcgcttcgttaatacagatgtaggtgttccacagggtagccagcagcatcctgcgatgcagatccggaacataatggtgcagggcgctgacttccgcgtttccagactttacgaaacacggaaaccgaagaccattcatgttgttgctcaggtcgcagacgttttgcagcagcagtcgcttcacgttcgctcgcgtatcggtgattcattctgctaaccagtaaggcaaccccgccagcctagccgggtcctcaacgacaggagcacgatcatgcgcacccgtggccaggacccaacgctgcccgagatgcgccgcgtgcggctgctggagatggcggacgcgatggatatgttctgccaagggttggtttgcgcattcacagttctccgcaagaattgattggctccaattcttggagtggtgaatccgttagcgaggtgccgccggcttccattcaggtcgaggtggcccggctccatgcaccgcgacgcaacgcggggaggcagacaaggtatagggcggcgcctacaatccatgccaacccgttccatgtgctcgccgaggcggcataaatcgccgtgacgatcagcggtccaatgatcgaagttaggctggtaagagccgcgagcgatccttgaagctgtccctgatggtcgtcatctacctgcctggacagcatggcctgcaacgcgggcatcccgatgccgccggaagcgagaagaatcataatggggaaggccatccagcctcgcgtcgcgaacgccagcaagacgtagcccagcgcgtcggccgccatgccggcgataatggcctgcttctcgccgaaacgtttggtggcgggaccagtgacgaaggcttgagcgagggcgtgcaagattccgaataccgcaagcgacaggccgatcatcgtcgcgctccagcgaaagcggtcctcgccgaaaatgacccagagcgctgccggcacctgtcctacgagttgcatgataaagaagacagtcataagtgcggcgacgatagtcatgccccgcgcccaccggaaggagctgactgggttgaaggctctcaagggcatcggtcgagacgtaggatccatgcatgttaattaacatcatcaataatataccttattttggattgaagccaatatgataatgagggggtggagtttgtgacgtggcgcggggcgtgggaacggggcgggtgacgtaggttttagggcggagtaacttgtatgtgttgggaattgtagttttcttaaaatgggaagtgacgtaacgtgggaaaacggaagtgacgatttgaggaagttgtgggttttttggctttcgtttctgggcgtaggttcgcgtgcggttttctgggtgttttttgtggactttaaccgttacgtcattttttagtcctatatatactcgctctgcacttggcccttttttacactgtgactgattgagctggtgccgtgtcgagtggtgtttttttaataggttttcttttttactggtaaggctgactgttatggctgccgctgtggaagcgctgtatgttgttctggagcgggagggtgctattttgcctaggcaggagggtttttcaggtgtttatgtgtttttctctcctattaattttgttatacctcctatgggggctgtaatgttgtctctacgcctgcgggtatgtattcccccgggctatttcggtcgctttttagcactgaccgatgtgaatcaacctgatgtgtttaccgagtcttacattatgactccggacatgaccgaggagctgtcggtggtgctttttaatcacggtgaccagtttttttacggtcacgccggcatggccgtagtccgtcttatgcttataagggttgtttttcctgttgtaagacaggcttctaatgtttaaatgtttttttgttattttattttgtgtttatgcagaaacccgcagacatgtttgagagaaaaatggtgtctttttctgtggtggttccggagcttacctgcctttatctgcatgagcatgactacgatgtgctttcttttttgcgcgaggctttgcctgattttttgagcagcaccttgcattttatatcgccgcccatgcaacaagcttacatcggggctacgctggttagcatagctccgagtatgcgtgtcataatcagtgtgggttcttttgtcatggttcctggcggggaagtggccgcgctggtccgtgcagacctgcacgattatgttcagctggccctgcgaagggacctacgggatcgcggtatttttgttaatgttccgcttttgaatcttatacaggtctgtgaggaacctgaatttttgcaatcatgattcgctgcttgaggctgaaggtggagggcgctctggagcagatttttacaatggccggacttaatattcgggatttgcttagagatatattgagaaggtggcgagatgagaattatttgggcatggttgaaggtgctggaatgtttatagaggagattcaccctgaagggtttagcctttacgtccacttggacgtgagggccgtttgccttttggaagccattgtgcaacatcttacaaatgccattatctgttctttggctgtagagtttgaccacgccaccggaggggagcgcgttcacttaatagatcttcattttgaggttttggataatcttttggaataaaaaaaaaaacatggttcttccagctcttcccgctcctcccgtgtgtgactcgcagaacgaatgtgtaggttggctgggtgtggcttattctgcggtggtggatgttatcagggcagcggcgcatgaaggagtttacatagaacccgaagccagggggcgcctggatgctttgagagagtggatatactacaactactacacagagcgatctaagcggcgagaccggagacgcagatctgtttgtcacgcccgcacctggttttgcttcaggaaatatgactacgtccggcgttccatttggcatgacactacgaccaacacgatctcggttgtctcggcgcactccgtacagtagggatcgtctacctccttttgagacagaaacccgcgctaccatactggaggatcatccgctgctgcccgaatgtaacactttgacaatgcacaacgtgagttacgtgcgaggtcttccctgcagtgtgggatttacgctgattcaggaatgggttgttccctgggatatggttctaacgcgggaggagcttgtaatcctgaggaagtgtatgcacgtgtgcctgtgttgtgccaacattgatatcatgacgagcatgatgatccatggttacgagtcctgggctctccactgtcattgttccagtcccggttccctgcagtgtatagccggcgggcaggttttggccagctggtttaggatggtggtggatggcgccatgtttaatcagaggtttatatggtaccgggaggtggtgaattacaacatgccaaaagaggtaatgtttatgtccagcgtgtttatgaggggtcgccacttaatctacctgcgcttgtggtatgatggccacgtgggttctgtggtccccgccatgagctttggatacagcgccttgcactgtgggattttgaacaatattgtggtgctgtgctgcagttactgtgctgatttaagtgagatcagggtgcgctgctgtgcccggaggacaaggcgccttatgctgcgggcggtgcgaatcatcgctgaggagaccactgccatgttgtattcctgcaggacggagcggcggcggcagcagtttattcgcgcgctgctgcagcaccaccgccctatcctgatgcacgattatgactctacccccatgtaggcgtggacttctccttcgccgcccgttaagcaaccgcaagttggacagcagcctgtggctcagcagctggacagcgacatgaacttaagtgagctgcccggggagtttattaatatcactgatgagcgtttggctcgacaggaaaccgtgtggaatataacacctaagaatatgtctgttacccatgatatgatgctttttaaggccagccggggagaaaggactgtgtactctgtgtgttgggagggaggtggcaggttgaatactagggttctgtgagtttgattaaggtacggtgatctgtataagctatgtggtggtggggctatactactgaatgaaaaatgacttgaaattttctgcaattgaaaaataaacacgttgaaacataacacaaacgattctttattcttgggcaatgtatgaaaaagtgtaagaggatgtggcaaatatttcattaatgtagttgtggccagaccagtcccatgaaaatgacatagagtatgcacttggagttgtgtctcctgtttcctgtgtaccgtttagtgtaatggttagtgttacaggtttagttttgtctccgtttaagtaaacttgactgacaatgttacttttggcagttttaccgtgagattttggataagctgataggttaggcataaatccaacagcgtttgtataggctgtgccttcagtaagatctccatttctaaagttccaatattctgggtccaggaaggaattgtttagtagcactccattttcgtcaaatcttataataagatgagcactttgaactgttccagatattggagccaaactgcctttaacagccaaaactgaaactgtagcaagtatttgactgccacattttgttaagaccaaagtgagtttagcatctttctctgcatttagtctacagttaggagatggagctggtgtggtccacaaagttagcttatcattatttttgtttcctactgtaatggcacctgtgctgtcaaaactaaggccagttcctagtttaggaaccatagccttgtttgaatcaaattctaggccatggccaatttttgttttgaggggatttgtgtttggtgcattaggtgaaccaaattcaagcccatctcctgcattaatggctatggctgtagcgtcaaacatcaaccccttggcagtgcttaggttaacctcaagctttttggaattgtttgaagctgtaaacaagtaaaggcctttgttgtagttaatatccaagttgtgggctgagtttataaaaagagggccctgtcctagtcttagatttagttggttttgagcatcaaacggataactaacatcaagtataaggcgtctgttttgagaatcaatccttagtcctcctgctacattaagttgcatattgccttgtgaatcaaaacccaaggctccagtaactttagtttgcaaggaagtattattaatagtcacacctggaccagttgctacggtcaaagtgtttaggtcgtctgttacatgcaaaggagccccgtactttagtcctagttttccattttgtgtataaatgggctctttcaagtcaatgcccaagctaccagtggcagtagttagagggggtgaggcagtgatagtaagggtactgctatcggtggtggtgagggggcctgatgtttgcagggctagctttccttctgacactgtgaggggtccttgggtggcaatgctaagtttggagtcgtgcacggttagcggggcctgtgattgcatggtgagtgtgttgcccgcgaccattagaggtgcggcggcagccacagttagggcttctgaggtaactgtgaggggtgcagatatttccaggtttatgtttgacttggtttttttgagaggtgggctcacagtggttacattttgggaggtaaggttgccggcctcgtccagagagaggccgttgcccattttgagcgcaagcatgccattggaggtaactagaggttcggataggcgcaaagagagtaccccagggggactctcttgaaacccattgggggatacaaagggaggagtaagaaaaggcacagttggaggaccggtttccgtgtcatatggatacacggggttgaaggtatcttcagacggtcttgcgcgcttcatctgcaacaacatgaagatagtgggtgcggatggacaggaacaggaggaaactgacattccatttagattgtggagaaagtttgcagccaggaggaagctgcaataccagagctgggaggagggcaaggaggtgctgctgaataaactggacagaaatttgctaactgattttaagtaagtgatgctttattatttttttttattagttaaagggaataagatccccgggtactctagttaatcgacttaggcgacctgacattaactagaggatcttgatgtaatccagggttaggacagttgcaaatcacagtgagaacacagggtcccctgtcccgctcaactagcagggggcgctgggtaaactcccgaatcaggctacgggcaagctctccctgggcggtaagccggacgccgtgcgccgggccctcgatatgatcctcgggcaattcaaagtagcaaaactcaccggagtcgcgggcaaagcacttgtggcggcgacagtggaccaggtgtttcaggcgcagttgctctgcctctccacttaacattcagtcgtagccgtccgccgagtcctttaccgcgtcaaagttaggaataaattgatccggatagtggccgggaggtcccgagaaggggttaaagtagaccgatggcacaaactcctcaataaattgcagagttccaatgcctccagagcgcggctcagaggacgaggtctgcagagttaggattgcctgacgaggcgtgaatgaagagcggccggcgccgccgatctgaaatgtcccgtccggacggagaccaagcgaggagctcaccgactcgtcgttgagctgaatacctcgccctctgattgtcaggtgagttataccctgcccgggcgaccgcaccctgtgacgaaagccgcccgcaagctgcgcccctgagttagtcatctgaacttcggcctgggcgtctctgggaagtaccacagtggtgggagcgggactttcctggtacaccagggcagcgggccaactacggggattaaggttattacgaggtgtggtggtaatagccgcctgttccaggagaattcggtttcggtgggcgcgtattccgttgacccgggatatcatgtggggtcccgcgctcatgtagtttattcgggttgagtagtcttgggcagctccagccgcaagtcccatttgtggctggtaactccacatgtagggcgtgggaatttccttgctcataatggcgctgacaacaggtgctggcgccgggtgtggccgctggagatgacgtagttttcgcgcttaaatttgagaaagggcgcgaaactagtccttaagagtcagcgcgcagtatttactgaagagagcctccgcgtcttccagcgtgcgccgaagctgatcttcgcttttgtgatacaggcagctgcgggtgagggatcgcagagacctgttttttattttcagctcttgttcttggcccctgctctgttgaaatatagcatacagagtgggaaaaatcctgtttctaagctcgcgggtcgatacgggttcgttgggcgccagacgcagcgctcctcctcctgctgctgccgccgctgtggatttcttgggctttgtcagagtcttgctatccggtcgcctttgcttctgtgtggccgctgctgttgctgccgctgccgccggtgcagtatgggctgtagagatgacggtagtaatgcaggatgttacgggggaaggccacgccgtgatggtagagaagaaagcggcgggcgaaggagatgttgcccccacagtcttgcaagcaagcaactatggcgttcttgtgcccgcgccatgagcggtagccttggcgctgttgttgctcttgggctaacggcggcggctgcttggacttaccggccctggttccagtggtgtcccatctacggttgggtcggcgaacgggcagtgccggcggcgcctgaggagcggaggttgtagccatgctggaaccggttgccgatttctggggcgccggcgaggggaatgcgaccgagggtgacggtgtttcgtctgacacctcttcgacctcggaagcttcctcgtctaggctctcccagtcttccatcatgtcctcctcctcctcgtccaaaacctcctctgcctgactgtcccagtattcctcctcgtccgtgggtggcggcggcagctgcagcttctttttgggtgccatcctgggaagcaagggcccgcggctgctgctgatagggctgcggcggcggggggattgggttgagctcctcgccggactgggggtccaagtaaaccccccgtccctttcgtagcagaaactcttggcgggctttgttgatggcttgcaattggccaagaatgtggccctgggtaatgacgcaggcggtaagctccgcattaggcgggcgggattggtcttcgtagaacctaatctcgtgggcgtggtagtcctcaggtacaaatttgcgaaggtaagccgacgtccacagccccggagtgagtttcaaccccggagccgcggacttttcgtcaggcgagggaccctgcagctcaaaggtaccgataatttgactttcgttaagcagctgcgaattgcaaaccagggagcggtgcggggtgcataggttgcagcgacagtgacactccagtagaccgtcaccgctcacgtcttccattatgtcagagtggtaggcaaggtagttggctagctgcagaaggtagcagtggccccaaagcggcggagggcattcgcggtacttaatgggcacaaagtcgctaggaagtgcacagcaggtggcgggcaagattcctgagcgctctaggataaagttcctaaagttctgcaacatgctttgactggtgaagtctggcagaccctgttgcagggttttaagcaggcgttcggggaaaatgatgtccgccaggtgcgcggccacggagcgctcgttgaaggccgtccataggtccttcaagttttgctttagcagtttctgcagctccttgaggttgcactcctccaagcactgctgccaaacgcccatggccgtctgccaggtgtagcatagaaataagtaaacgcagtcgcggacgtagtcgcggcgcgcctcgcccttgagcgtggaatgaagcacgttttgcccaaggcggttttcgtgcaaaattccaaggtaggagaccaggttgcagagctccacgttggagatcttgcaggcctggcgtacgtagccctgtcgaaaggtgtagtgcaatgtttcctctagcttgcgctgcatctccgggtcagcaaagaaccgctgcatgcactcaagctccacggtaacgagcactgcggccatcattagtttgcgtcgctcctccaagtcggcaggctcgcgcgtttgaagccagcgcgctagctgctcgtcgccaactgcgggtaggccctcctctgtttgttcttgcaaatttgcatccctctccaggggctgcgcacggcgcacgatcagctcactcatgactgtgctcatgaccttggggggtaggttaagtgccgggtaggcaaagtgggtgacctcgatgctgcgttttagtacggctaggcgcgcgttgtcaccctcgagttccaccaacactccagagtgactttcattttcgctgttttcctgttgcagagcgtttgccgcgcgcttctcgtcgcgtccaagaccctcaaagatttttggcacttcgttgagcgaggcgatatcaggtatgacagcgccctgccgcaaggccagctgcttgtccgctcggctgcggttggcacggcaggataggggtatcttgcagttttggaaaaagatgtgataggtggcaagcacctctggcacggcaaatacggggtagaagttgaggcgcgggttgggctcgcatgtgccgttttcttggcgtttggggggtacgcgcggtgagaataggtggcgttcgtaggcaaggctgacatccgctatggcgaggggcacatcgctgcgctcttgcaacgcgtcgcagataatggcgcactggcgctgcagatgcttcaacagcacgtcgtctcccacatctaggtagtcgccatgcctttcgtccccccgcccgacttgttcctcgtttgcctctgcgttgtcctggtcttgctttttatcctctgttggtactgagcggtcctcgtcgtcttcgcttacaaaacctgggtcctgctcgataatcacttcctcctcctcaagcgggggtgcctcgacggggaaggtggtaggcgcgttggcggcatcggtggaggcggtggtggcgaactcagagggggcggttaggctgtccttcttctcgactgactccatgatctttttctgcctataggagaaggaaatggccagtcgggaagaggagcagcgcgaaaccacccccgagcgcggacgcggtgcggcgcgacgtcccccaaccatggaggacgtgtcgtccccgtccccgtcgccgccgcctccccgggcgcccccaaaaaagcggatgaggcggcgtatcgagtccgaggacgaggaagactcatcacaagacgcgctggtgccgcgcacacccagcccgcggccatcgacctcggcggcggatttggccattgcgcccaagaagaaaaagaagcgcccttctcccaagcccgagcgcccgccatcaccagaggtaatcgtggacagcgaggaagaaagagaagatgtggcgctacaaatggtgggtttcagcaacccaccggtgctaatcaagcatggcaaaggaggtaagcgcacagtgcggcggctgaatgaagacgacccagtggcgcgtggtatgcggacgcaagaggaagaggaagagcccagcgaagcggaaagtgaaattacggtgatgaacccgctgagtgtgccgatcgtgtctgcgtgggagaagggcatggaggctgcgcgcgcgctgatggacaagtaccacgtggataacgatctaaaggcgaacttcaaactactgcctgaccaagtggaagctctggcggccgtatgcaagacctggctgaacgaggagcaccgcgggttgcagctgaccttcaccagcaacaagacctttgtgacgatgatggggcgattcctgcaggcgtacctgcagtcgtttgcagaggtgacctacaagcatcacgagcccacgggctgcgcgttgtggctgcaccgctgcgctgagatcgaaggcgagcttaagtgtctacacggaagcattatgataaataaggagcacgtgattgaaatggatgtgacgagcgaaaacgggcagcgcgcgctgaaggagcagtctagcaaggccaagatcgtgaagaaccggtggggccgaaatgtggtgcagatctccaacaccgacgcaaggtgctgcgtgcacgacgcggcctgtccggccaatcagttttccggcaagtcttgcggcatgttcttctctgaaggcgcaaaggctcaggtggcttttaagcagatcaaggcttttatgcaggcgctgtatcctaacgcccagaccgggcacggtcaccttttgatgccactacggtgcgagtgcaactcaaagcctgggcacgcgccctttttgggaaggcagctaccaaagttgactccgttcgccctgagcaacgcggaggacctggacgcggatctgatctccgacaagagcgtgctggccagcgtgcaccacccggcgctgatagtgttccagtgctgcaaccctgtgtatcgcaactcgcgcgcgcagggcggaggccccaactgcgacttcaagatatcggcgcccgacctgctaaacgcgttggtgatggtgcgcagcctgtggagtgaaaacttcaccgagctgccgcggatggttgtgcctgagtttaagtggagcactaaacaccagtatcgcaacgtgtccctgccagtggcgcatagcgatgcgcggcagaacccctttgatttttaaacggcgcagacggcaagggtgggggtaaataatcacccgagagtgtacaaataaaagcatttgcctttattgaaagtgtctctagtacattatttttacatgtttttcaagtgacaaaaagaagtggcgctcctaatctgcgcactgtggctgcggaagtagggcgagtggcgctccaggaagctgtagagctgttcctggttgcgacgcagggtgggctgtacctggggactgttgagcatggagttgggtaccccggtaataaggttcatggtggggttgtgatccatgggagtttggggccagttggcaaaggcgtggagaaacatgcagcagaatagtccacaggcggccgagttgggcccctgtacgctttgggtggacttttccagcgttatacagcggtcgggggaagaagcaatggcgctacggcgcaggagtgactcgtactcaaactggtaaacctgcttgagtcgctggtcagaaaagccaaagggctcaaagaggtagcatgtttttgagtgcgggttccaggcaaaggccatccagtgtacgcccccagtctcgcgaccggccgtattgactatggcgcaggcgagcttgtgtggagaaacaaagcctggaaagcgcttgtcataggtgcccaaaaaatatggcccacaaccaagatctttgacaatggctttcagttcctgctcactggagcccatggcggcagctgttgttgatgttgcttgcttctttatgttgtggcgttgccggccgagaagggcgtgcgcaggtacacggtttcgatgacgccgcggtgcggctggtgcacacggaccacgtcaaagacttcaaacaaaacataaagaagggtgggctcgtccatgggatccacctcaaaagtcatgtctagcgcgtgggcggagttggcgtagagaaggttttggcccaggtctgtgagtgcgcccatggacataaagttactggagaatgggatgcgccaaagggtgcgatcgcaaagaaactttttctgggtaatgctgtcaactgcggtcttgcctataagcggataggggaagttagcagggtaggcctgtccttcgcgcatggtgggggcaaggtagccaacaaatccagagttgttgtgttggtgtaggatgcccacctgttggtagtccttgtatttagtatcatccaccacctgacggctcatgggctggaagtttctaaagaaggagtacatgcggtccttgtagctctctgggatatagaagccctggtagccaatgttatagttagctagcatttgtaccaggaaccagtctttggtcatgttacactgggcaacgttgtaaccctccccgtcaactgagcgcttaatttcaaactcgttgggggtaagcaggcggtcattgccaggccagctgacagaagagtcaaaggtaatggccaccttcttaaaggtgtggttgaggtaaaaggttccatctaggtagggtatagagccagagtaggtgtaataagggtcgtagcccgagcccagtgatggggtttccttagtcttaaggcgcgtgaaggcccagccgcggaaagccgcccagttgcgggaggggatggatatgggcacgttggtagcgttggcgggtatagggtagagcatgttggcggcggagagatagtcgttaaaggactggtcgttggtgtcgtttctaagcatggcctcaagcgtggaggcggtgttgtgggccatggggaagaaggtggcgtaaaggcaaatgctatcaaacttaatgctggctccgtcaacccttaggtcatttcctagggagctctgcagaaccatgttaacatccttcctgaagttccactcgtaggtgtatgagcccggcaggagaaggaggtttttaatggcaaagaacttctgaggcacctggatgtggaagggcacatagcgaccattgcccagcaacattgagcggtagcgcaggccagcattgcggtggtggttaaatgggttgacgttgtccatatagtcaagggaccagcgtgctccaaggttaatgtagcagtccactagcccgggagccaccactcgcttgttcatgtagtcgtaggtgtttgggttatcagaaatttttacgttggaaggactgtactttagcttgtcgggcaaatacagcgctatgttggagtacaggaaatttctccacaggttggcatttagattgatttccatggcaaaattatttccaactcttatttcatttttatctgaaaattctgtagcatctttttcccatccattttcctgacctgttttaggttttaccttggtaagagtctctgtattaatcacacctcccagtggaaagcagtaatttggaagttcatcttcagttccatgattttcaataattctaacatctggatcatagctgtcaacagcctgattccacatagaaaagtacctggttctatcaccaatggaatcaagcaaaagctggtatgaaagctctgtgtttctgtcttgcaaatctacaacagcattcaactgcgatgcttggcccgccagaacacccatattacccgtgctgttgtaatacattagaccaataaaattgtccctaaaagcaatgtaattaggcctgttgggcatagattgttggcccattagttctcgtgagttaccttccttaatagtgggcatgtaagaaatatgagtgtctggggtttctatatctacatcttcactgtacaataccactttaggagtcaagttatcaccattgcctgcggctgcctcagtagttgagaaaaattgcatttccacttgactttctagctttccattttgttgctttacaagaatgccttgccctccattttcatttgtgggttttgcatatgaaccgtaacatggtttcattggggtagtcttttttaggactctcccagctgcatgattaatttctgtttcgtaccactgagattctcctatttgaggttcaggttgaaatgttttatcggcatatttaggtgtttgaccttcgacacctatttgaataccctcctttgtaatatttataccagaataaggcgcctgcccaaatacgtgagttttttgctgctcagcttgctcgtctacttcgtcttcgttgtcatcgtcctcttcttctaggtttatttcaagagcagtagcagcttcatcccattcgcaaggatttggggcacccttgggagccagggcgttgtaggcagtgccagagtagggcttaaaagtagggcccctgtccagcacgccgcggatgtcaaagtacgtggaagccatgtccagcacacggttatcacccacagctagggtgaaccgcgccttgtacgagtacgcagtatcctcacggtccacagggatgaaccgcagcgtcaaacgctgggaccggtctgtggtcacgtcgtgcgtaggcgccaccgtggggtttctaaacttgttattcaggctgaagtacgtctcggtggcgcgggcaaactgcaccagcccggggctcaggtactccgaggcgtcctggcccgagatgtgcatgtaagaccactgcggcatcatcgaaggggtagccatcttggaaagcgggcgcgcggcggctcagcagctcctctggcggcgacatggacgcatacatgacacacatacgacacgttagctatcagaagcatcgtcggcgcttcagggattgcacccccagacccacgatgctgttcagtgtgctttgccagttgccactggctacgggccgcaacgatcgcggaccgctggcggcgcggcgcagggacgcgcggctaggacgggttacaacaacggcggtcgggcctggcagcacaggtttctgctgggtgtcggcggggggaggcaggtccagcgttacgggtgtgtgctggcccagcactccggtagccatgggcgcgatgggacgggtggtgggcaggccttgctttagtgcctcctcgtacgagggaggctcgtctatttgcgtcaccagagtttcttccctgtcggggcgcggacgcttttcgccacgcccctctggagacactgtctccacggccggtggaggctcctctacgggagggcggggatcaagcttactgttaatcttattttgcactgcctggttggccaggtccaccaccccgctaatgccagaggccaggccatctaccaccttttgttggaaattttgctctttcaacttatccctcagcatctggcctgtgctgctgttccaggccttgctgccatagttcttaacggtggaaccgaaatttttaatgccgctccacagcgagccccagctgaaggcgccaccgctcatattgctggtgccgatatcttgccagtttcccatgaacgggcgcgagccgtgtcgcggggccagagacgcaaagttgatgtcttccattctacaaaatagttacaggaccaagcgagcgtgagagtccagactttttattttgatttttccacatgcaacttgtttttaatcagtgtctctgcgcctgcaaggccacggatgcaattccgggcacggcgccaatcgccgcggcgatcagtggaataaggaggggcaggataccgccgcgcatgcgacggtgcgacgcgcgccgccgccggtggtgcgcacgacgcatgccgcccgtcaggccgtggccggccatgcccctcctacggtgcattcttcctcggaatcccggcaccgggaaacggaggcggcaggtgagggccatatctgcaagaaccacaaagaccggcttttaaacgatgctggggtggtagcgcgctgttggcagcaccagggtcctgcctccttcgcgagccaccctgcgcacggaaatcggggccagcacgggctggcgacggcgacggcggcggcgggttccagtggtggttcggcgtcgggtagttgctcgtcttctggggcggtaggtgtagccacgatagccgggggtaggcgcaatggaaggatgtagggcatattcgggcagtagcgcgctggcggcgccgtacttcctcgaacggcgcgggcgccggggggctgaaacgcgaaacatccacgggtccgtttgcacctccgtagaggtcttggacgcggccgcagcgaccgcctgcaccgcggcatccgccaccgctgaggcaaccggggacgtttgtgtctccatgccctctgtggcggtggcaatactggtgctactggtagtgggtatctgaacgtccacggtctgcacgcccagtcccggcgccacctgcttgattggccgcacgcggacctcgggctccagcccaggttccacggtcattttttccaagacatcttccagtcgctggcgcttgggtaccatcagctgcacggtgggtgccaagtcaccagactcgcgctttaggccgcgcttttcttcggacggtgcaagcgcgggcagcacctgctgcagtgttacgggctttaggctaggtgttgggttgccctcgtccagcggcaacgccagcatgtccttatgccgctttccgtaggcaaactccccgaggcgctcgttggcctgctcaagcaggtcctcgtcgccgtacacctcatcatacacgcgcttgtaggtgcgggtggagcgctcaccgggcgtaaagactacggtggtgccgggtcgcaaaacacgttttacgcgtcgacctttccactgtacccgtcgcctgggcgcggtagcgtgcagcagttccacctcgtcgtcaagttcatcatcatcatctttctttttctttttgacccgctttagctttcggggcttgtaatcctgctcttccttcttcggggggccatagatctccggcgcgatgacctggagcatctcttctttgattttgcgcttggacatagcttcgttgcgcgccgccgccgctggatacatacaacagtacgagtctaagtagttttttcttgcaatctagttgcgcggggggcgggtgcgcacgggcacgcgcaggccgctaaccgagtcgcgcacccaatacacgttgcccctgcgaccctgagtcatagcactaatggccgcggctgctgcggcggccgctcgtcgcctggacctggggggcacagtgacaatacccgcggccagccttcgagcggcccgcatggccgcccgtcggccggtgcgacgtgcgcggttaagcagggccgccgccgcgcgttgggcggcagtgccgggtcggcggcggtggcgacgtgctacgcgcctccgccgtctcttcattttagcatagcgccgggctccgcgcaccacggtctgaatggccgcgtccactgtggacactggtggcggcgtgggcgtgtagttgcgcgcctcctccaccaccgcgtcgatggcgtcatcgacggtggtgcgcccagtgcggccgcgtttgtgcgcgccccagggcgcgcggtagtgcccgcgcacgcgcactgggtgttggtcggagcgcttcttggccccgccaaacatcttgcttgggaagcgcaggccccagcctgtgttattgctgggcgatataaggatggacatgcttgctcaaaaagtgcggctcgataggacgcgcggcgagactatgcccagggccttgtaaacgtaggggcaggtgcggcgtctggcgtcagtaatggtcactcgctggactcctccgatgctgttgcgcagcggtagcgtcccgtgatctgtgagagcaggaacgttttcactgacggtggtgatggtgggggctggcgggcgcgccaaaatctggttctcgggaaagcgattgaacacgtgggtcagagaggtaaactggcggatgagttgggagtagacggcctggtcgttgtagaagctcttggagtgcacgggcaacagctcggcgcccaccaccggaaagttgctgatctggcgcgtggagcggaaggtcacggggtcttgcatcatgtctggcaacgaccagtagacctgctccgagccgcaggttacgtcaggagtgcaaagcagggtccatgagcggattccggtctgagggtcgccgtagttgtatgcaaggtaccagctgcggtactgggtgaaggtgctgtcattgcttattaggttgtaactgcgtttcttgctgtcctctgtcaggggtttgatcaccggtttcttctgaggcttctcgacctcgggttgcgcagcgggggcggcagcttcggccgctgcttcggcctcagcgcgcttctcctcagcccgtgtggcaaaggtgtcgccgcgaatggcatgatcgttcatgtcctccaccggctgcattgccgcggctgccgcgttggagttctcttccgcgccgctgccactgctgttgctgccgcctgcgccacccccgccctgttcggtgtcatctttcaagctcgcctggtaggcgtccacatccaacagtgcgggaatgttaccaccctccagatcatcgtaggtgatcctaaagccctcctggaagggttgccgcttgcggatgcccaacaagttgctcaggcggctgtgggtgaagtccaccccgcatcctggcagcaaaatgatgtctggatggaaggcttcgtttgtatataccccaggcatgacaagaccagtgacggggtcaaaccccagtctgaagttgcgggtgtcaaactttaccccgatgtcgctttccagaaccccgttctgtctgcccactttcaagtagtgctccacgatcgcgttgttcataaggtctatggtcatggtctcggagtagttgccctcgggcagcgtgaactccacccactcgtatttcagctccacctgattgtccttagtaggcaagcgcgacaccatcacccgcgccttaaacttattggtaaacatgaactcgttcacatttggcatgttggtatgcaggatggttttcaggtcgccgccccagtgcgaccggtcgtcaagattgatggtctgtgtgcttgcctcccccgggctgtagtcattgttttgaatgaccgtggtcagaaagttgctgtggtcgttctggtagttcagggatgccacatccgttgacttgttgtccaccaggtacacacgggtggtgtcgaataggggtgccaactcagagtaacggatgctgtttctccccccggtaggccgcaggtaccgcggaggcacaaacggcgggtccaggggagcatcgaagggagaacccagcgccgccgccactggcgccgcgctcaccacactctcgtaggagggaggaggaccttcctcatacatcgccgcgcgccgcatactaaggggaatacaagaaaaccaacgctcggtgccatggccttggtgagttttttattttgcatcatgcttttttttttttaaaacattctccccagcctggggcgaaggtgcgcaaacgggttgccactccctcccaaatccaggacgctgctgtcgtctgccgagtcatcgtcctcccacaccagaccccgctgacggtcgtgcctttgacgacgggtgggcgggcgcgggcctggcacgtccctgtgctcctgcgcgtacgtcttccatctactcatcttgtccactaggctctctatcccgttgttgggaaatgccggaggcaggtttttttcgcgctgcggctgcagcagcgagttgtttaggtactcctcctcgcccagcaggcgcgggcgggtggtgcgagtgctggtaagagaccctatcaagcttggaaatgggctactagcatctgaccgcggggccgcagcgcctagatcggacaagctgcttggcctgcggaagctttcctttcgcagcgccgcctctgcctgctcgcgctgttgcaactctagcagggtctgcggttgcggggaaaacacgctgtcgtctatgtcgtcccagaggaatccatcgttaccctcgggcacctcgaatcccccggtgtagaaaccagggggcggtagccagtgcgggttcaagatggcattggtgaaatactcggggttcacggcggccgcgcgatgcaagtagtccattaggcggttgataaacggccggtttgaggcatacatgcccggttccatgttgcgcgcggtcatgtccagcgccacgctgggcgttaccccgtcgcgcatcaggttaaggctcacgctctgctgcacgtagcgcaaaatgcgctcctcctcgctgtttaaactgtgcaacgaggggatcttctgccgccggttggtcagcaggtagtttagggttgcctccaggctgcccgtgtcctcctgccccagcgcgcggctgacacttgtaatctcctggaaagtatgctcgtccacatgcgcctgacctatggcctcgcggtacagtgtcagcaagtgacctaggtatgtgtcccgggacacgctgccactgtccgtgaagggcgctattagcagcagcaacaggcgcgagttgggcgtcagcaagctagacacggtcgcgcggtcgcctgtgggagcccgcaccccccacagcccctgcaagtttttgaaagcctggctcaggtttacggtctgcaggccttgtctactggtctggaaaaaatagtctggcccagactggtacacctcactttgcggtgtctcagtcaccattagccgcagtgcgctcacaaagttggtgtagtcctcctgtccccgcggcacgttggcgggctgtgtactcaggaaggcgtttagtgcaaccatggagcccaggttgccctgctgctgcgcgcgctcacgctgcgccacggcctcgcgcacatcccccaccagccggtccaggttggtctgcacgttgccgctgttgtaacgagccacgcgctgaagcagcgcgtcgtagaccaggccggcctcgtcgggccggatggccctgttttcggccagcgcgtttacgatcgccagcaccttctcgtgcgtggggtttgcgcgcgccgggaccaccgcttccagaattgcggagagccggttggcctgcggctgctgccggaacgcgtcaggattgcgcgcagtcagcgacatgatgcggtccatgacctggcgccagtcgtccgtggagttaaggccggacggctggctctgcagcgccgcccgcaccgccgggtccgttgcgtcttgcatcatctgatcagaaacatcaccgcttagtactcgccgtcctctggctcgtactcatcgtcctcgtcatattcctccacgccgccgacgttgccagcgcgcgcgggtgccaccgccagcccaggtccggccccagctgcctccagggcgcgtcggcttggggcccagcgcaggtcagcgcccgcgtcaaagtaggactcggcctctctatcgccgctgcccgtgccagccagggccctttgcaggctgtgcatcagctcgcggtcgctgagctcgcgccgccggctcacgctcacggccttgtggatgcgctcgttgcgataaacgcccaggtcgtcgctcaaggtaagcaccttcagcgccatgcgcatgtagaacccctcgatctttacctccttgtctatgggaacgtaaggggtatggtatatcttgcgggcgtaaaacttgcccaggctaagcatggaatagttgatggcggccaccttgtcagccaggctcaagctgcgctcctgcaccactatgctctgcaggatgtttatcaaatcgagcagccagcggccctcgggctctactatgtttagcagcgcatccctgaatgcctcgttgtccctgctgtgctgcactataaggaacagctgcgccatgagcggcttgctatttgggttttgctccagcgcgcttacaaagtcccacagatgcatcagtcctatagccacctcctcgcgcgccacaagcgtacgcacgtggttgttaaagcttttttgaaagttaatctcctggttcaccgtctgctcgtatgcggttaccaggtcggcggccgccacgtgtgcgcgcgcgggactaatcccggttcgcgcgtcgggctcaaagtcctcctcgcgcagcaaccgctcgcgattcaggccatgccgcagctcgcgccctgcgtggaactttcgatcccgcatctcctcgggctcctctccctcgcggtcgcgaaacaggttctgccgcggcacgtacgcctcacgcgtatcacgcttcagctgcacccttgggtgccgctcaggagagggcgctcctagccgcgccaggccctcgccctcctccaagtccaggtagtgccgggcccggcgccgcgggggttcgtaatcaccatctgctgccgcgtcaaccgcggatgtcgcccctcctgacgcggtaggaggaggggagggtgccctgcatgtctgccgctgctcttgctcttgccgctgctgaggaggggggcgcatctgccgcagcaccggatgcatctgggaaaagcaaaaaaggggctcgtccctgtttccggaggaatttgcaagcggggtcttgcatgacggggaggcaaacccccgttcgccgcagtccggccggtccgagactcgaaccgggggtcccgcgactcaacccttggaaaataaccctccggctacagggagcgagccacttaatgctttcgctttccagcctaaccgcttacgctgcgcgcggccagtggccaaaaaagctagcgcagcagccgccgcgcctggaaggaagccaaaaggagcactcccccgttgtctgacgtcgcacacctgggttcgacacgcgggcggtaaccgcatggatcacggcggacggccggatacggggctcgaaccccggtcgtccgccatgatacccttgcgaatttatccaccagaccacggaagagtgcccgcttacaggctctccttttgcacgctagagcgtcaacgattgcgcgcgcctgaccggccagagcgtcccgaccatggagcactttttgccgctgcgcaacatctggaaccgcgtccgcgactttccgcgcgcctccaccaccgccgccggcatcacctggatgtccaggtacatctacggatatcatcgccttatgttggaagatctcgcccccggagccccggccaccctacgctggcccctctaccgccagccgccgccgcactttttggtgggataccagtacctggtgcggacttgcaacgactacgtatttgactcgagggcttactcgcgtctcaggtacaccgagctctcgcagccgggtcaccagaccgttaactggtccgttatggccaactgcacttacaccatcaacacgggcgcataccaccgctttgtggacatggatgacttccagtctaccctcacgcaggtgcagcaggccatattagccgagcgcgttgtcgccgacctagccctgcttcagccgatgaggggcttcggggtcacacgcatgggaggaagagggcgccacctacggccaaactccgccgccgccgcagcgatagatgcaagagatgcaggacaagaggaaggagaagaagaagtgccggtagaaaggctcatgcaagactactacaaagacctgcgccgatgtcaaaacgaagcctggggcatggccgaccgcctgcgcattcagcaggccggacccaaggacatggtgcttctgtcgaccatccgccgtctcaagaccgcctactttaattacatcatcagcagcacctccgccagaaacaaccccgaccgccgcccgctgccgcccgccacggtgctcagcctaccttgcgactgtgactggttagacgcctttctcgagaggttttccgatccggtcgatgcggactcgctcaggtccctcggcggcggagtacctacacaacaattgttgagatgcatcgttagcgccgtatccctgccgcatggcagccccccgccaacccataaccgggacatgacgggcggcgtcttccaactgcgcccccgcgagaacggccgcgccgtcaccgagaccatgcgccgtcgccgcggggagatgatcgagcgctttgtcgaccgcctcccggtgcgccgtcgtcgccgccgtgtcccccctcccccaccgccgccagaagaagaagaaggggaggcccttatggaagaggagattgaagaagaagaagaggcccctgtagcctttgagcgcgaggtgcgcgacactgtcgccgagctcatccgtcttctggaggaggagttaaccgtgtcggcgcgcaactcccagtttttcaacttcgccgtggacttctacgaggccatggagcgccttgaggccttgggggatatcaacgaatccacgttgcgacgctgggttatgtacttcttcgtggcagaacacaccgccaccaccctcaactacctctttcagcgcctgcgaaactacgccgtcttcgcccggcacgtggagctcaatctcgcgcaggtggtcatgcgcgcccgcgatgccgaagggggcgtggtctacagccgcgtctggaacgagggaggcctcaacgccttctcgcagctcatggcccgcatttccaacgacctcgccgccaccgtggagcgagccggacgcggagatctccaggaggaagagatcgagcagttcatggccgagatcgcctatcaagacaactcaggagacgtgcaggagattttgcgccaggccgccgtcaacgacaccgaaattgattctgtcgaactctctttcaggttcaagctcaccgggcccgtcgtcttcacgcagaggcgccagattcaggagatcaaccgccgcgtcgtcgcgttcgccagcaacctacgcgcgcagcaccagctcctgcccgcgcgcggcgccgacgtgcccctgccccctctcccggcgggtccggagccccccctacctccgggggctcgcccgcgtcaccgcttttagatgcatcatccaaggacacccccgcggcccaccgcccgccgcgcggtaccgtagtcgcgccgcggggatgcggcctcttgcaagccatcgacgccgccaccaaccagcccctggaaattaggtatcacctggatctagcccgcgccctgacccgtctatgcgaggtaaacctgcaggagctcccgcctgacctgacgccgcgggagctccagaccatggacagctcccatctgcgcgatgttgtcatcaagctccgaccgccgcgcgcggacatctggactttgggctcgcgcggcgtggtggtccgatccaccgtaactcccctcgagcagccagacggtcaaggacaagcagccgaagtagaagaccaccagccaaacccgccaggcgaggggctcaaattcccactctgcttccttgtgcgcggtcgtcaggtcaacctcgtgcaggatgtacagcccgtgcaccgctgccagtactgcgcacgtttttacaaaagccagcacgagtgttcggcccgtcgcagggacttctactttcaccacatcaatagccactcctccaattggtggcgggagatccagttcttcccgatcggctcgcatcctcgcaccgagcgtctctttgtcacctacgatgtagagacctatacttggatgggggcctttgggaagcagctcgtgcccttcatgctggtcatgaagttcggcggagatgagcctctagtgactgccgcgcgagacctagccgcgaaccttggatgggaccgctgggaacaagacccgcttaccttctactgcatcaccccagaaaaaatggccataggtcgccagtttaggacctttcgcgaccacctgcaaatgctaatggcccgtgacctgtggagctcattcgtcgcttccaaccctcatcttgcagactgggccctttcagagcacgggctcagctcccctgaagagctcacctacgaggaacttaaaaaattgccttccatcaagggcatcccgcgcttcttggaactttacattgtgggccacaacatcaacggctttgacgagatcgtgctcgccgcccaggtaattaacaaccgttccgaggtgccgggacccttccgcatcacacgcaactttatgcctcgcgcgggaaagatactcttcaacgatgtcaccttcgccctgccaaatccgcgttccaaaaagcgcacggactttttgctctgggagcagggcggatgcgacgacactgacttcaaataccagtacctcaaagtcatggtcagggacacctttgcgctcacccacacctcgctccggaaggccgcgcaggcatacgcgctacccgtagaaaagggatgctgcgcctaccaggccgtcaaccagttctacatgctaggctcttaccgttcggaggccgacgggtttccgatccaagagtactggaaagaccgcgaagagtttgtcctcaaccgcgagctgtggaaaaaaaagggacaggataagtatgacatcatcaaggaaaccctggactactgcgccctagacgtgcaggtcaccgccgagctggtcaacaagctgcgcgactcctacgcctccttcgtgcgtgacgcggtaggtctcacagacgccagcttcaacgtcttccagcgtccaaccatatcatccaactcacatgccatcttcaggcagatagtcttccgagcagagcagcccgcccgtagcaacctcggtcccgacctcctcgctccctcgcacgaactatacgattacgtgcgcgccagcatccgcggtggaagatgctaccctacatatcttggaatactcagagagcccctctacgtttacgacatttgcggcatgtacgcctccgcgctcacccaccccatgccatggggtcccccactcaacccatacgagcgcgcgcttgccgcccgcgcatggcagcaggcgctagacttgcaaggatgcaagatagactacttcgacgcgcgcctgctgcccggggtctttaccgtggacgcagaccccccggacgagacgcagctagaccccctaccgccattctgctcgcgcaagggcggccgcctctgctggaccaacgagcgcctacgcggagaggtagccaccagcgttgaccttgtcaccctgcacaaccgcggttggcgcgtgcacctggtgcccgacgagcgcaccaccgtctttcccgaatggcggtgcgttgcgcgcgaatacgtgcagctaaacatcgcggccaaggagcgcgccgatcgcgacaaaaaccaaaccctgcgctccatcgccaagttgctgtccaacgccctctacgggtcgtttgccaccaagcttgacaacaaaaagattgtcttttctgaccagatggatgcggccaccctcaaaggcatcaccgcgggccaggtgaatatcaaatcctcctcgtttttggaaactgacaatcttagcgcagaagtcatgcccgcttttcagagggagtactcaccccaacagctggccctcgcagacagcgatgcggaagagagtgaggacgaacgcgcccccacccccttttatagccccccttcaggaacacccggtcacgtggcctacacctacaaaccaatcaccttccttgatgccgaagagggcgacatgtgtcttcacaccctggagcgagtggaccccctagtggacaacgaccgctacccctcccacttagcctccttcgtgctggcctggacgcgagcctttgtctcagagtggtccgagtttctatacgaggaggaccgcggaacaccgctcgaggacaggcctctcaagtctgtatacggggacacggacagccttttcgtcaccgagcgtggacaccggctcatggaaaccagaggtaagaaacgcatcaaaaagcatgggggaaacctggtttttgaccccgaacggccagagctcacctggctcgtggaatgcgagaccgtctgcggggcctgcggcgcggatgcctactccccggaatcggtatttctcgcgcccaagctctacgccctcaaaagtctgcactgcccctcgtgcggcgcctcctccaagggcaagctgcgcgccaagggccacgccgcggaggggctggactatgacaccatggtcaaatgctacctggccgacgcgcagggcgaagaccggcagcgcttcagcaccagcaggaccagcctcaagcgcaccctggccagcgcgcagcccggagcgcaccccttcaccgtgacccagactacgctgacgaggaccctgcgcccgtggaaagacatgaccctggcccgtctggacgagcaccgactactgccgtacagcgaaagccgccccaacccgcgaaacgaggagatatgctggatcgagatgccgtagagcaggtgaccgagctgtgggaccgcctggaactgcttggtcaaacgctcaaaagcatgcctacggcggacggtctcaaaccgttgaaaaactttgcttccttgcaagaactgctatcgctgggcggcgagcgccttctggcggatttggtcagggaaaacatgcgagtcagggacatgcttaacgaagtggcccccctgctcagggatgacggcagctgcagctctcttaactaccagttgcagccggtaataggtgtgatttacgggcccaccggctgcggtaagtcgcagctgctcaggaacctgctttcttcccagctgatctcccctaccccggaaaccgttttcttcatcgccccgcaggtagacatgatccccccatctgaactcaaagcgtgggaaatgcaaatctgtgagggtaactacgcccctgggccggatggaaccattataccgcagtctggcaccctccgcccgcgctttgtaaaaatggcctatgacgatctcatcctggaacacaactatgacgttagtgatcccagaaatatcttcgcccaggccgccgcccgtgggcccattgccatcattatggacgaatgcatggaaaatcttggaggtcacaagggcgtctccaagttcttccacgcatttccttctaagctacatgacaaatttcccaagtgcaccggatacactgtgctggtggttctgcacaacatgaatccccggagggatatggctgggaacatagccaacctaaaaatacagtccaagatgcatctcatatccccacgtatgcacccatcccagcttaaccgctttgtaaacacttacaccaagggcctgcccctggcaatcagcttgctactgaaagacatttttaggcaccacgcccagcgctcctgctacgactggatcatctacaacaccaccccgcagcatgaagctctgcagtggtgctacctccaccccagagacgggcttatgcccatgtatctgaacatccagagtcacctttaccacgtcctggaaaaaatacacaggaccctcaacgaccgagaccgctggtcccgggcctaccgcgcgcgcaaaacccctaaataaagacagcaagacacttgcttgatccaaatccaaacagagtctggttttttatttatgttttaaaccgcattgggaggggaggaagccttcagggcagaaacctgctggcgcagatccaacagctgctgagaaacgacattaagttcccgggtcaaagaatccaattgtgccaaaagagccgtcaacttgtcatcgcgggcggatgaacgggaagctgcactgcttgcaagcgggctcaggaaagcaaagtcagtcacaatcccgcgggcggtggctgcagcggctgaagcggcggcggaggctgcagtctccaacggcgttccagacacggtctcgtaggtcaaggtagtagagtttgcgggcaggacggggcgaccatcaatgctggagcccatcacattctgacgcaccccggcccatgggggcatgcgcgttgtcaaatatgagctcacaat

SEQ ID NO: 211 - DNA, 9709 bp, synthetic construct
  source 1..9709: mol_type = other DNA
taacatcatcaataatataccttattttggattgaagccaatatgataatgagggggtggagtttgtgacgtggcgcggggcgtgggaacggggcgggtgacgtagtagtgtggcggaagtgtgatgttgcaagtgtggcggaacacatgtaagcgacggatgtggcaaaagtgacgtttttggtgtgcgccggtgtacacaggaagtgacaattttcgcgcggttttaggcggatgttgtagtaaatttgggcgtaaccgagtaagatttggccattttcgcgggaaaactgaataagaggaagtgaaatctgaataattttgtgttactcatagcgcgtaatactgtcgagtctaggctcaagcagtgatccttatcgattttaccacatttgtagaggttttacttgctttaaaaaacctcccacatctccccctgaacctgaaacataaaatgaatgcaattgttgttgttaacttgtttattgcagcttataatggttacaaataaagcaatagcatcacaaatttcacaaataaagcatttttttcactgcattctagttgtggtttgtccaaactcatcaatgtatcttatcatgtctgctcgaagcggccctagaggtaccacgcgtcggaggtcagatgtaaccaagattagcccacggcgcattatataccctttaagccccgccccatttaacacgccatgcaagttaaacattatctcaccctttattaaacttacatcaactcattcagcaaacaaaggcgttaaccacacacgcaatcacaggtttacaccttatggcctggggcgtttacagctcaagtccaaaggttgcccaggctcgttaagcaagtcctcgatacattccacagcctggcgacgcccaccaactctcacggcaactggtttaatggggcacagcgggaccaccgggtgtatctcaggaggtgtgttagaaggaccggagtcacagctatccgtactactattgcattctctagacacaggtgatgtcgggcgtctcaggatagcaggcgccattttaggacggcgggtaggtcttgcaggctccggttctggctcgggctcaggctcaggttcagacacaggaccttttaaaaaaatcacaatacaaaattctttaaaccacaaaactgtaaaaattaaaaaaaaaattaccacaccaaacccaccactctatcacccactgcccataattttcacttactgtagacaaacatgccacaggtcctcatatagcaaagcgaacacataatatctgggtcccccgtattcctccggtgataatgacaagacctgcaaccgtgcccggggtgctccacataatctaacacaaactcctcaccctcttcatcctcgtcgtcactgggtggaaagccagcctcgtggcaggtaagatcgatcacctccggtacaaggtttggcatagaaaccggacccaaggctctctgctccggctgctcgggctgccgggaaaggtgaggcggctccggagaaccgggcgccggcggaaaagtgagtaagtcaatcccttcctgcaccgccaacattacagagtcgggaaaaatctgcgaaaccgcctcctcgttgggatcttcgggggccgtcacgtctaaatcatgctagccatggttgtggcaagcttatcatcgtgtttttcaaaggaaaaccacgtccccgtggttcggggggcctagacgttttttaacctcgactaaacacatgtaaagcatgtgcaccgaggccccagatcagatcccatacaatggggtaccttctgggcatccttcagccccttgttgaatacgcttgaggagagccatttgactctttccacaactatccaactcacaacgtggcactggggttgtgccgcctttgcaggtgtatcttatacacgtggcttttggccgcagaggcacctgtcgccaggtggggggttccgctgcctgcaaagggtcgctacagacgttgtttgtcttcaagaagcttccagaggaactgcttccttcacgacattcaacagaccttgcattcctttggcgagaggggaaagacccctaggaatgctcgtcaagaagacagggccaggtttccgggccctcacattgccaaaagacggcaatatggtggaaaataacatatagacaaacgcacaccggccttattccaagcggcttcggccagtaacgttaggggggggggagggagagggcggaattcggagagggcggaattcggggccgcggagatcttccaaacttggacctgggagtggacacctgtggagagaaaggcaaagtggatgtcattgtcactcaagtgtatggccagatcgggccaggtgaatatcaaatcctcctcgtttttggaaactgacaatcttagcgcagaagtcatgcccgcttttgagagggagtactcaccccaacagctggatctcaagcctgccacacctcacctcgaccatccgccggctcaagaccgcctactttaattacatcatcagcagcacctccgccagaaacaaccccgaccgccacccgctgccgcccgccacggtgctcagcctaccttgcgactgtgactggttagacgcctttctcgagaggttttccgatccggtcgatgcggactggctcaggtccctcggtggcggagtaccgttcggaggccgacgggtttccgatccaagagtactggaaagaccgcgaagagtttgtcctcaaccgcgagcccaacagctggccctcgcagacagcgatgcggaagagagtgaccgcggaggctggatcggtcccggtgtcttctatggaggtcaaaacagcgtggatggcgtctccaggcgatatgaggcgcgcccggttcactaaacaccggtaacaaacagacaatctggtctgtttgtattataccggttgcttatataggcctcccaccgtacacgcctacctcgacccggcaagcttgcccatttgcgtcaacggggcggggttattacgacattttggaaagtcccgttgattttggtgccaaaacaaactcccattgacgtcaatggggtggagacttggaaatccccgtgagtcaaaccgctatccacgcccattggtgtactgccaaaaccgcatcaccatggtaatagcgatgactaatacgtagatgtactgccaagtaggaaagtcccgtaaggtcatgtactgggcataatgccaggcgggccatttaccgtcattgacgtcaatagggggcggacttggcatatgatacacttgatgtactgccaagtgggcagtttaccgtaaatactccacccattgacgtcaatggaaagtccctattggcgttactatgggaacatacgtcattattgacgtcaatgggcgggggtcgttgggcggtcagccaggcgggccatttaccgtaagttatgtaacgaagcttctcgaggtcgagatcgatctgggcgtggttaagggtgggaaagaatatataaggtgggggtcttatgtagttttgtatctgttttgcagcagccgccgccgccatgagcaccaactcgtttgatggaagcattgtgagctcatatttgacaacgcgcatgcccccatgggccggggtgcgtcagaatgtgatgggctccagcattgatggtcgccccgtcctgcccgcaaactctactaccttgacctacgagaccgtgtctggaacgccgttggagactgcagcctccgccgccgcttcagccgctgcagccaccgcccgcgggattgtgactgactttgctttcctgagcccgcttgcaagcagtgcagcttcccgttcatccgcccgcgatgacaagttgacggctcttttggcacaattggattctttgacccgggaacttaatgtcgtttctcagcagctgttggatctgcgccagcaggtttctgccctgaaggcttcctcccctcccaatgcggtttaaaacataaataaaaaaccagactctgtttggatttggatcaagcaagtgtcttgctgtctttatttaggggttttgcgcgcgcggtaggcccgggaccagcggtctcggtcgttgagggtcctgtgtattttttccaggacgtggtaaaggtgactctggatgttcagatacatgggcataagcccgtctctggggtggaggtagcaccactgcagagcttcatgctgcggggtggtgttgtagatgatccagtcgtagcaggagcgctgggcgtggtgcctaaaaatgtctttcagtagcaagctgattgccaggggcaggcccttggtgtaagtgtttacaaagcggttaagctgggatgggtgcatacgtggggatatgagatgcatcttggactgtatttttaggttggctatgttcccagccatatccctccggggattcatgttgtgcagaaccaccagcacagtgtatccggtgcacttgggaaatttgtcatgtagcttagaaggaaatgcgtggaagaacttggagacgcccttgtgacctccaagattttccatgcattcgtccataatgatggcaatgggcccacgggcggcggcctgggcgaagatatttctgggatcactaacgtcatagttgtgttccaggatgagatcgtcataggccatttttacaaagcgcgggcggagggtgccagactgcggtataatggttccatccggcccaggggcgtagttaccctcacagatttgcatttcccacgctttgagttcagatggggggatcatgtctacctgcggggcgatgaagaaaacggtttccggggtaggggagatcagctgggaagaaagcaggttcctgagcagctgcgacttaccgcagccggtgggcccgtaaatcacacctattaccgggtgcaactggtagttaagagagctgcagctgccgtcatccctgagcaggggggccacttcgttaagcatgtccctgactcgcatgttttccctgaccaaatccgccagaaggcgctcgccgcccagcgatagcagttcttgcaaggaagcaaagtttttcaacggtttgagaccgtccgccgtaggcatgcttttgagcgtttgaccaagcagttccaggcggtcccacagctcggtcacctgctctacggcatctcgatccagcatatctcctcgtttcgcgggttggggcggctttcgctgtacggcagtagtcggtgctcgtccagacgggccagggtcatgtctttccacgggcgcagggtcctcgtcagcgtagtctgggtcacggtgaaggggtgcgctccgggctgcgcgctggccagggtgcgcttgaggctggtcctgctggtgctgaagcgctgccggtcttcgccctgcgcgtcggccaggtagcatttgaccatggtgtcatagtccagcccctccgcggcgtggcccttggcgcgcagcttgcccttggaggaggcgccgcacgaggggcagtgcagacttttgagggcgtagagcttgggcgcgagaaataccgattccggggagtaggcatccgcgccgcaggccccgcagacggtctcgcattccacgagccaggtgagctctggccgttcggggtcaaaaaccaggtttcccccatgctttttgatgcgtttcttacctctggtttccatgagccggtgtccacgctcggtgacgaaaaggctgtccgtgtccccgtatacagacttgagagggagtttaaacgaattcaatagcttgttgcatgggcggcgatataaaatgcaaggtgctgctcaaaaaatcaggcaaagcctcgcgcaaaaaagaaagcacatcgtagtcatgctcatgcagataaaggcaggtaagctccggaaccaccacagaaaaagacaccatttttctctcaaacatgtctgcgggtttctgcataaacacaaaataaaataacaaaaaaacatttaaacattagaagcctgtcttacaacaggaaaaacaacccttataagcataagacggactacggccatgccggcgtgaccgtaaaaaaactggtcaccgtgattaaaaagcaccaccgacagctcctcggtcatgtccggagtcataatgtaagactcggtaaacacatcaggttgattcatcggtcagtgctaaaaagcgaccgaaatagcccgggggaatacatacccgcaggcgtagagacaacattacagcccccataggaggtataacaaaattaataggagagaaaaacacataaacacctgaaaaaccctcctgcctaggcaaaatagcaccctcccgctccagaacaacatacagcgcttcacagcggcagcctaacagtcagccttaccagtaaaaaagaaaacctattaaaaaaacaccactcgacacggcaccagctcaatcagtcacagtgtaaaaaagggccaagtgcagagcgagtatatataggactaaaaaatgacgtaacggttaaagtccacaaaaaacacccagaaaaccgcacgcgaacctacgcccagaaacgaaagccaaaaaacccacaacttcctcaaatcgtcacttccgttttcccacgttacgtaacttcccattttaagaaaactacaattcccaacacatacaagttactccgccctaaaacctacgtcacccgccccgttcccacgccccgcgccacgtcacaaactccaccccctcattatcatattggcttcaatccaaaataaggtatattattgatgatgttaattaacatgcatggatccatatgcggtgtgaaataccgcacagatgcgtaaggagaaaataccgcatcaggcgctcttccgcttcctcgctcactgactcgctgcgctcggtcgttcggctgcggcgagcggtatcagctcactcaaaggcggtaatacggttatccacagaatcaggggataacgcaggaaagaacatgtgagcaaaaggccagcaaaaggccaggaaccgtaaaaaggccgcgttgctggcgtttttccataggctccgcccccctgacgagcatcacaaaaatcgacgctcaagtcagaggtggcgaaacccgacaggactataaagataccaggcgtttccccctggaagctccctcgtgcgctctcctgttccgaccctgccgcttaccggatacctgtccgcctttctcccttcgggaagcgtggcgctttctcatagctcacgctgtaggtatctcagttcggtgtaggtcgttcgctccaagctgggctgtgtgcacgaaccccccgttcagcccgaccgctgcgccttatccggtaactatcgtcttgagtccaacccggtaagacacgacttatcgccactggcagcagccactggtaacaggattagcagagcgaggtatgtaggcggtgctacagagttcttgaagtggtggcctaactacggctacactagaaggacagtatttggtatctgcgctctgctgaagccagttaccttcggaaaaagagttggtagctcttgatccggcaaacaaaccaccgctggtagcggtggtttttttgtttgcaagcagcagattacgcgcagaaaaaaaggatctcaagaagatcctttgatcttttctacggggtctgacgctcagtggaacgaaaactcacgttaagggattttggtcatgagattatcaaaaaggatcttcacctagatccttttaaattaaaaatgaagttttaaatcaatctaaagtatatatgagtaaacttggtctgacagttaccaatgcttaatcagtgaggcacctatctcagcgatctgtctatttcgttcatccatagttgcctgactccccgtcgtgtagataactacgatacgggagggcttaccatctggccccagtgctgcaatgataccgcgagacccacgctcaccggctccagatttatcagcaataaaccagccagccggaagggccgagcgcagaagtggtcctgcaactttatccgcctccatccagtctattaattgttgccgggaagctagagtaagtagttcgccagttaatagtttgcgcaacgttgttgccattgctgcagccatgagattatcaaaaaggatcttcacctagatccttttcacgtagaaagccagtccgcagaaacggtgctgaccccggatgaatgtcagctactgggctatctggacaagggaaaacgcaagcgcaaagagaaagcaggtagcttgcagtgggcttacatggcgatagctagactgggcggttttatggacagcaagcgaaccggaattgccagctggggcgccctctggtaaggttgggaagccctgcaaagtaaactggatggctttctcgccgccaaggatctgatggcgcaggggatcaagctctgatcaagagacaggatgaggatcgtttcgcatgattgaacaagatggattgcacgcaggttctccggccgcttgggtggagaggctattcggctatgactgggcacaacagacaatcggctgctctgatgccgccgtgttccggctgtcagcgcaggggcgcccggttctttttgtcaagaccgacctgtccggtgccctgaatgaactgcaagacgaggcagcgcggctatcgtggctggccacgacgggcgttccttgcgcagctgtgctcgacgttgtcactgaagcgggaagggactggctgctattgggcgaagtgccggggcaggatctcctgtcatctcaccttgctcctgccgagaaagtatccatcatggctgatgcaatgcggcggctgcatacgcttgatccggctacctgcccattcgaccaccaagcgaaacatcgcatcgagcgagcacgtactcggatggaagccggtcttgtcgatcaggatgatctggacgaagagcatcaggggctcgcgccagccgaactgttcgccaggctcaaggcgagcatgcccgacggcgaggatctcgtcgtgacccatggcgatgcctgcttgccgaatatcatggtggaaaatggccgcttttctggattcatcgactgtggccggctgggtgtggcggaccgctatcaggacatagcgttggctacccgtgatattgctgaagagcttggcggcgaatgggctgaccgcttcctcgtgctttacggtatcgccgctcccgattcgcagcgcatcgccttctatcgccttcttgacgagttcttctgaattttgttaaaatttttgttaaatcagctcattttttaaccaataggccgaaatcggcaacatcccttataaatcaaaagaatagaccgcgatagggttgagtgttgttccagtttggaacaagagtccactattaaagaacgtggactccaacgtcaaagggcgaaaaaccgtctatcagggcgatggcccactacgtgaaccatcacccaaatcaagttttttgcggtcgaggtgccgtaaagctctaaatcggaaccctaaagggagcccccgatttagagcttgacggggaaagccggcgaacgtggcgagaaaggaagggaagaaagcgaaaggagcgggcgctagggcgctggcaagtgtagcggtcacgctgcgcgtaaccaccacacccgcgcgcttaatgcgccgctacagggcgcgtccattcgccattcaggatcgaattaattcttaat

SEQ ID NO: 212 - DNA, 38 bp, synthetic construct
  source 1..38: mol_type = other DNA
aaaagaattcgattgggttcgattggcaatgttgtctc

SEQ ID NO: 213 - DNA, 38 bp, synthetic construct
  source 1..38: mol_type = other DNA
aaaaactagtgatgtcccgggtacgaccatcacccgag

SEQ ID NO: 214 - DNA, 35 bp, synthetic construct
  source 1..35: mol_type = other DNA
aaaaaagcttcacgacatgctcccccccgacgagc

SEQ ID NO: 215 - DNA, 35 bp, synthetic construct
  source 1..35: mol_type = other DNA
aaaacagctgacgcggaactagcgcggaccggtcg

SEQ ID NO: 216 - DNA, 46 bp, synthetic construct
  source 1..46: mol_type = other DNA
ctagtgaattctagtggatcccccgggctgcaggaattcgatatca

SEQ ID NO: 217 - DNA, 46 bp, synthetic construct
  source 1..46: mol_type = other DNA
agcttgatatcgaattcctgcagcccgggggatccactagaattca

SEQ ID NO: 218 - DNA, 25 bp, synthetic construct
  source 1..25: mol_type = other DNA
ctctgacctgagattggcggcactg

SEQ ID NO: 219 - DNA, 46 bp, synthetic construct
  source 1..46: mol_type = other DNA
gcggccgcagcgctgcggccgccgcgggcgcgctcctgaccgcggg

SEQ ID NO: 220 - DNA, 47 bp, synthetic construct
  source 1..47: mol_type = other DNA
gcggccgcagcgctgcggccgccagcgcggcggggcccggccaacca

SEQ ID NO: 221 - DNA, 25 bp, synthetic construct
  source 1..25: mol_type = other DNA
ttcttccctcttctcccgccctcca

SEQ ID NO: 222 - DNA, 806 bp, synthetic construct
  source 1..806: mol_type = other DNA
gaattcccgccgccaccatggagttcggcctgtcctggctgtttctggtcgccatcctgaagggcgttcagtgcgagatcgtgctgacccagtctccagccaccctgtctctgagccccggcgagcgggctaccctgagctgcagagcttctcagagcgtgagcagctacctggcctggtaccagcagaaacctggacaagctcctcggctgctgatctacgacgcctctaatagagccacaggcattcctgctagattcagcggctctggctccgggactgatttcaccctgacaatcagcagcctggagcccgaggacttcgccgtgtactactgtcagcagagcagcaactggcccagaaccttcggccaaggcaccaaggtggaaatcaagggcggcggaggcagcggcggcggcggctccggcggaggaggcagccaggtgcagctggtggaaagcggcggcggcgtggtgcagcctggcaggagcctgagactggactgcaaggccagcggcatcacctttagcaatagcggaatgcactgggtcagacaggcccctggcaaaggtcttgagtgggtggccgtgatctggtatgacggctctaagcggtactacgccgactccgtgaagggccggttcaccatcagcagagataacagcaagaacaccctgttcctgcagatgaacagcctgcgcgccgaggataccgccgtgtactactgcgccacaaacgacgactactggggccagggcacactcgtgacagtgtctagccaccatcaccaccaccactgaggatcc

SEQ ID NO: 223 - DNA, 1731 bp, synthetic construct [sequence omitted]

SEQ ID NO: 224 - protein, 576 aa, synthetic construct
MERGGEAAAAAAAAAAAPGRGSESPVTISRAGNAGELVSPLLLPPTRRRRRRHIQGPGPVLNLPSAAAAPPVARAPEAAGGGSRSEDYSSSPHSAAAAARPLAAEEKQAQSLQPSSSRRSSHYPAAVQSQAAAERGASATAKSRAISILQKKPRHQQLLPSLSSFFFSHRLPDITAIIKEIVSRNKRRYQEDGFDLDLTYIYPNIIAMGFPAERLEGVYRNNIDDVVRFLDSKHKNHYKIYNLCAERHYDTAKFNCRVAQYPFEDHNPPQLELIKPFCEDLDQWLSEDDNHVAAIHCKAGKGRTGVMICAYLLHRGKFLKAQEALDFYGEVRTRDKKGVTIPSQRRYVYYYSYLLKNHLDYRPVALLFHKMMFETIPMFSGGTCNPQFVVCQLKVKIYSSNSGPTRREDKFMYFEFPQPLPVCGDIKVEFFHKQNKMLKKDKMFHFWVNTFFIPGPEETSEKVENGSLCDQEIDSICSIERADNDKEYLVLTLTKNDLDKANKDKANRYFSPNFKVKLYFTKTVEEPSNPEASSSTSVTPDVSDNEPDHYRYSDTTDSDPENEPFDEDQHTQITKV

SEQ ID NO: 225 - DNA, 7286 bp, synthetic construct [sequence omitted]

SEQ ID NO: 226 - DNA, 3069 bp, synthetic construct
  source 1..3069: mol_type = other DNA
gaattcccgccgccaccatgaagtgggtcacctttattagtctgctgtttctgttttcttccgcttactcacgaggggtctttaggagagatgctcacaaatcagaggtggcccaccggtttaaggacctgggcgaggagaacttcaaggccctggtgctgatcgcctttgcccagtatctgcagcagtgccccttcgaggatcacgtgaagctggtgaatgaggtgaccgagtttgccaagacatgcgtggccgacgagtctgccgagaactgtgataagagcctgcacaccctgttcggcgacaagctgtgcaccgtggccacactgcgggagacatacggcgagatggccgattgctgtgccaagcaggagcccgagagaaatgagtgctttctgcagcacaaggacgataacccaaatctgccaaggctggtgcgccctgaggtggacgtgatgtgcaccgcctttcacgataacgaggagacattcctgaagaagtatctgtacgagatcgcccggagacacccatatttctacgcccccgagctgctgttctttgccaagagatataaggccgcctttaccgagtgctgtcaggcagcagacaaggcagcatgcctgctgcctaagctggacgagctgagggatgagggcaaggccagctccgccaagcagcgcctgaagtgtgccagcctgcagaagtttggcgagagggccttcaaggcctgggcagtggcaaggctgtctcagagatttccaaaggccgagttcgccgaggtgagcaagctggtgaccgatctgacaaaggtgcacaccgagtgctgtcacggcgacctgctggagtgcgcagacgatagagccgatctggccaagtacatctgtgagaaccaggacagcatctctagcaagctgaaggagtgctgtgagaagcccctgctggagaagtcccactgcatcgccgaggtggagaatgacgagatgccagcagatctgccttctctggcagcagacttcgtggagagcaaggacgtgtgcaagaactatgccgaggccaaggacgtgttcctgggcatgttcctgtatgagtacgccaggcgccacccagactattccgtggtgctgctgctgcggctggccaagacctacgagacaaccctggagaagtgctgtgcagcagccgatccccacgagtgctacgcaaaggtgtttgacgagttcaagcctctggtggaggagccacagaacctgatcaagcagaattgtgagctgttcgagcagctgggcgagtataagtttcagaatgccctgctggtgagatacaccaagaaggtgccccaggtgtccacccctacactggtggaggtgtctaggaacctgggcaaggtcggcagcaagtgctgtaagcacccagaggcaaagaggatgccatgcgcagaggactatctgtccgtggtgctgaatcagctgtgcgtgctgcacgagaagaccccagtgtctgatagggtgaccaagtgctgtacagagtccctggtgaatagacggccctgcttctctgccctggaggtggacgagacatacgtgcctaaggagtttaacgccgagacattcaccttccacgccgatatctgtaccctgagcgagaaggagcgccagatcaagaagcagacagccctggtggagctggtgaagcacaagcccaaggccaccaaggagcagctgaaggccgtgatggacgattttgccgccttcgtggagaagtgctgtaaggccgacgataaggagacatgcttcgcagaggagggcaagaagctggtggcagcatcccaggccgccctgggcctgatgaccgccatcatcaaggagatcgtgagccgcaataagaggcgctatcaggaggatggcttcgacctggatctgacatatatctacccaaacatcatcgccatgggatttccagcagagaggctggagggcgtgtacaggaacaatatcgacgatgtggtgaggttcctggactccaagcacaagaaccactataagatctacaatctgtgcgccgagcggcactatgataccgccaagttcaactgtagagtggcccagtacccatttgaggaccacaatccaccccagctggagctgatcaagcccttttgcgaggacctggatcagtggctgagcgaggacgataatcacgtggcagcaatccactgcaaggcaggcaagggaaggacaggcgtgatgatctgtgcctatctgctgcacaggggcaagttcctgaaggcccaggaggccctggacttttacggcgaggtgcggaccagagataagaagggcgtgacaatccctagccagcggcggtacgtgtactattactcctacctgctgaagaaccacctggactaccgcccagtggccctgctgtttcacaagatgatgttcgagacaatccctatgttctccggcggcacatgcaacccacagtttgtggtgtgccagctgaaggtgaagatctatagctccaattctggccccaccaggcgcgaggataagttcatgtactttgagttcccccagcctctgccagtgtgcggcgacatcaaggtggagtttttccacaagcagaacaagatgctgaagaaggataagatgtttcacttctgggtgaatacctttttcatccccggccctgaggagacaagcgagaaggtggagaatggctccctgtgcgaccaggagatcgattctatctgtagcatcgagagggccgacaacgataaggagtacctggtgctgaccctgacaaagaatgacctggataaggccaacaaggacaaggccaatcgctatttttctcccaacttcaaggtgaagctgtacttcaccaagacagtggaggagcctagcaatccagaggcctctagctccaccagcgtgacacccgacgtgtccgataacgagcctgaccactatcggtactccgataccacagactctgatcctgagaacgagccatttgacgaagaccagcatactcagattactaaagtctaataagcttggatcc

SEQ ID NO: 227 - protein, 1012 aa, synthetic construct
MKWVTFISLLFLFSSAYSRGVFRRDAHKSEVAHRFKDLGEENFKALVLIAFAQYLQQCPFEDHVKLVNEVTEFAKTCVADESAENCDKSLHTLFGDKLCTVATLRETYGEMADCCAKQEPERNECFLQHKDDNPNLPRLVRPEVDVMCTAFHDNEETFLKKYLYEIARRHPYFYAPELLFFAKRYKAAFTECCQAADKAACLLPKLDELRDEGKASSAKQRLKCASLQKFGERAFKAWAVARLSQRFPKAEFAEVSKLVTDLTKVHTECCHGDLLECADDRADLAKYICENQDSISSKLKECCEKPLLEKSHCIAEVENDEMPADLPSLAADFVESKDVCKNYAEAKDVFLGMFLYEYARRHPDYSVVLLLRLAKTYETTLEKCCAAADPHECYAKVFDEFKPLVEEPQNLIKQNCELFEQLGEYKFQNALLVRYTKKVPQVSTPTLVEVSRNLGKVGSKCCKHPEAKRMPCAEDYLSVVLNQLCVLHEKTPVSDRVTKCCTESLVNRRPCFSALEVDETYVPKEFNAETFTFHADICTLSEKERQIKKQTALVELVKHKPKATKEQLKAVMDDFAAFVEKCCKADDKETCFAEEGKKLVAASQAALGLMTAIIKEIVSRNKRRYQEDGFDLDLTYIYPNIIAMGFPAERLEGVYRNNIDDVVRFLDSKHKNHYKIYNLCAERHYDTAKFNCRVAQYPFEDHNPPQLELIKPFCEDLDQWLSEDDNHVAAIHCKAGKGRTGVMICAYLLHRGKFLKAQEALDFYGEVRTRDKKGVTIPSQRRYVYYYSYLLKNHLDYRPVALLFHKMMFETIPMFSGGTCNPQFVVCQLKVKIYSSNSGPTRREDKFMYFEFPQPLPVCGDIKVEFFHKQNKMLKKDKMFHFWVNTFFIPGPEETSEKVENGSLCDQEIDSICSIERADNDKEYLVLTLTKNDLDKANKDKANRYFSPNFKVKLYFTKTVEEPSNPEASSSTSVTPDVSDNEPDHYRYSDTTDSDPENEPFDEDQHTQITKV

SEQ ID NO: 228 - DNA, 8624 bp, synthetic construct
  source 1..8624: mol_type = other DNA
atccgtgtaaccgccagtccgtgcttgcctagcgaactcacccgtcccggctggcgtgcgcagcccgggccgtgttgcgggccctcttaaggggcggcggcaggacggggactcccgccccgcctcttttcccccggggagtcaacccccggggggggtgttttttgggggggggcgcgaaggcgggcggcggcggcgggcgggcggcagggcagccccgcgcgcccccttccccgtccctcccccggagccggccgctcccccgcgggcgccgcccctccccccgcgcgccgcggggctgccttcccgcgggcgcccccgcgcggcttttttcccgcgcccgcccccgcgcggcaggacggggactagcaggctgtgccgcagaccaccacacactcccaagctccccgcccccccgaagacgccagtcgcaccaccgctcgccctcgcagaccagacagttgcaccaagcacccgcccgcccgcacacggttccccgccaccccctccctcccctccatcccgccgagctcgcggcagcccctcccccccgcgcgccacggggctgcggtcccgcggccgcctcccccgcggccgcctcccccgcgccccgccccgggggcttcccccgcccctccccccgcgcccgcggccccgagctcgcagcagcccctccctcccgcgccccgtgccttccctcccgctcctgcgggggggctcgggccacctgaccttcgtaacctgcactcaggtcagagagatctgccggtctccctatagtgagtcgtattaatttcgataagccaggttaacctgcattaatgaatcggccaacgcgcggggagaggcggtttgcgtattgggcgctcttccgcttcctcgctcactgactcgctgcgctcggtcgttcggctgcggcgagcggtatcagctcactcaaaggcggtaatacggttatccacagaatcaggggataacgcaggaaagaacatgtgagcaaaaggccagcaaaaggccaggaaccgtaaaaaggccgcgttgctggcgtttttccataggctccgcccccctgacgagcatcacaaaaatcgacgctcaagtcagaggtggcgaaacccgacaggactataaagataccaggcgtttccccctggaagctccctcgtgcgctctcctgttccgaccctgccgcttaccggatacctgtccgcctttctcccttcgggaagcgtggcgctttctcaatgctcacgctgtaggtatctcagttcggtgtaggtcgttcgctccaagctgggctgtgtgcacgaaccccccgttcagcccgaccgctgcgccttatccggtaactatcgtcttgagtccaacccggtaagacacgacttatcgccactggcagcagccactggtaacaggattagcagagcgaggtatgtaggcggtgctacagagttcttgaagtggtggcctaactacggctacactagaaggacagtatttggtatctgcgctctgctgaagccagttaccttcggaaaaagagttggtagctcttgatccggcaaacaaaccaccgctggtagcggtggtttttttgtttgcaagcagcagattacgcgcagaaaaaaaggatctcaagaagatcctttgatcttttctacggggtctgacgctcagtggaacgaaaactcacgttaagggattttggtcatgagattatcaaaaaggatcttcacctagatccttttaaattaaaaatgaagttttaaatcaatctaaagtatatatgagtaaacttggtctgacagttaccaatgcttaatcagtgaggcacctatctcagcgatctgtctatttcgttcatccatagttgcctgactccccgtcgtgtagataactacgatacgggagggcttaccatctggccccagtgctgcaatgataccgcgagacccacgctcaccggctccagatttatcagcaataaaccagccagccggaagggccgagcgcagaagtggtcctgcaactttatccgcctccatccagtctattaattgttgccgggaagctagagtaagtagttcgccagttaatagtttgcgcaacgttgttgccattgctacaggcatcgtggtgtcacgctcgtcgtttggtatggcttcattcagctccggttcccaacgatcaaggcgagttacatgatcccccatgttgtgcaaaaaagcggttagctccttcggtcctccgatcgttgtcagaagtaagttggccgcagtgttatcactcatggttatggcagcactgcataattctcttactgtcatgccatccgtaagatgcttttctgtgactggtgagtactcaaccaagtcattctgagaatagtgtatgcggcgaccgagttgctcttgcccggcgtcaatacgggataataccgcgccacatagcagaactttaaaagtgctcatcattggaaaacgttcttcggggcgaaaactctcaaggatcttaccgctgttgagatccagttcgatgtaacccactcgtgcacccaactgatcttcagcatcttttactttcaccagcgtttctgggtgagcaaaaacaggaaggcaaaatgccgcaaaaaagggaataagggcgacacggaaatgttgaatactcatactcttcctttttcaatattattgaagcatttatcagggttattgtctcatgagcggatacatatttgaatgtatttagaaaaataaacaaataggggttccgcgcacatttccccgaaaagtgccacctgacgtctaagaaaccattattatcatgacattaacctataaaaataggcgtatcacgaggccctttcgtctcgcgcgtttcggtgatgacggtgaaaacctctgacacatgcagctcccggagacggtcacagcttgtctgtaagcggatgccgggagcagacaagcccgtcagggcgcgtcagcgggtgttggcgggtgtcggggctggcttaactatgcggcatcagagcagattgtactgagagtgcaccatatggacatattgtcgttagaacgcggctacaattaatacataaccttatgtatcatacacatacgatttaggtgacactatagaactcgagcagctgcggtgaaggtcgtcgtcagagattcccacctcggtctcctcctccgagtcgctgctggcgagccactgcatgtcgttgagcatcccccaggcgtgcggggcggcgggctgcttgacaaagcaacgggggggatttagagggcgcggggcgtgaggcgggacccccgcgccgtgtcccccgtgtccctccctcaccccggccccccgcccgctgctttttgttcggaagggggggagaaaggggtccgtaaccaaaggtggtctgcgtcctttggattccgacccctcgtctccccccctgtcccccgctctcgggctcctccctgcctccctcgcccccccagagggtcggggggcggcgcacggcccacgggggtcccccgaccgcttaagcgggccgggggtcggccccgtcaagcgtccccgcccccgagcccaccgcccgcgaccacccccaacccgcagccgggtggtccggggaaaagggggggcctgagacccgggggtcgccctctcaccgtgccgggggtctgccgcggcggccgctcggggccggggtccgcccgggagctcgtgccgggccggggttccatgagccggggtagggtagactcgagacggcggcccgcggtctctctcttgccgggttttagtctctgtctctccgggtctcctcctcccgccgggccgccgctccgtcgctcgcagtgccggggtgcgaatgcggcccgaccgtcacacggggctgccttatacccggcgcctatccactcccccaaaggggcggcatttacgattcccccaatagccgcgcgccccggcgggggcggagggagggaatccccccctctcggggcggccccgtccccggggaccaaccgggtgtactccaagaaccccattagcatgcgccgccccccgccgacgcagatgggagtccccccggcgccccgccggcgcggccctgagtggtgcccgcccccggggaaaaattcattagcatactaggaagcccaggggaccaataggggccgatcagcccacccacccggcggcgcgcgaggctctgcgtgttctgccaagaaagtaatcagcataacccggaaccccgagggagtaattacgcggggagcgaggggccgtccgaacgtttttaattaccataagcgggaatggcggcccgttaaaagctgctaattaccgcgagcgggaacgccggcccattaaaagttgctaattaccatgcgcggggatggcggccgggaccgcctattaaaagtttctaattaccataccgggaagccggctctagaggatccccgggtaccgagctcgaattcatcgatgatcgatgtacgggccagatatacgcgttgacattgattattgactagttattaatagtaatcaattacggggtcattagttcatagcccatatatggagttccgcgttacataacttacggtaaatggcccgcctggctgaccgcccaacgacccccgcccattgacgtcaataatgacgtatgttcccatagtaacgccaatagggactttccattgacgtcaatgggtggactatttacggtaaactgcccacttggcagtacatcaagtgtatcatatgccaagtacgccccctattgacgtcaatgacggtaaatggcccgcctggcattatgcccagtacatgaccttatgggactttcctacttggcagtacatctacgtattagtcatcgctattaccatggtgatgcggttttggcagtacatcaatgggcgtggatagcggtttgactcacggggatttccaagtctccaccccattgacgtcaatgggagtttgttttggcaccaaaatcaacgggactttccaaaatgtcgtaacaactccgccccattgacgcaaatgggcggtaggcgtgtacggtgggaggtctatataagcagagctctctggctaactagagaacccactgcttactggcttatcgaaattaatacgactcactatagggagacccaagcttggtaccgagctcggatccactagtaacggccgccagtgtgctggaattctgcagatatcgaattcccgccgccaccatgaagtgggtcacctttattagtctgctgtttctgttttcttccgcttactcacgaggggtctttaggagagatgctcacaaatcagaggtggcccaccggtttaaggacctgggcgaggagaacttcaaggccctggtgctgatcgcctttgcccagtatctgcagcagtgccccttcgaggatcacgtgaagctggtgaatgaggtgaccgagtttgccaagacatgcgtggccgacgagtctgccgagaactgtgataagagcctgcacaccctgttcggcgacaagctgtgcaccgtggccacactgcgggagacatacggcgagatggccgattgctgtgccaagcaggagcccgagagaaatgagtgctttctgcagcacaaggacgataacccaaatctgccaaggctggtgcgccctgaggtggacgtgatgtgcaccgcctttcacgataacgaggagacattcctgaagaagtatctgtacgagatcgcccggagacacccatatttctacgcccccgagctgctgttctttgccaagagatataaggccgcctttaccgagtgctgtcaggcagcagacaaggcagcatgcctgctgcctaagctggacgagctgagggatgagggcaaggccagctccgccaagcagcgcctgaagtgtgccagcctgcagaagtttggcgagagggccttcaaggcctgggcagtggcaaggctgtctcagagatttccaaaggccgagttcgccgaggtgagcaagctggtgaccgatctgacaaaggtgcacaccgagtgctgtcacggcgacctgctggagtgcgcagacgatagagccgatctggccaagtacatctgtgagaaccaggacagcatctctagcaagctgaaggagtgctgtgagaagcccctgctggagaagtcccactgcatcgccgaggtggagaatgacgagatgccagcagatctgccttctctggcagcagacttcgtggagagcaaggacgtgtgcaagaactatgccgaggccaaggacgtgttcctgggcatgttcctgtatgagtacgccaggcgccacccagactattccgtggtgctgctgctgcggctggccaagacctacgagacaaccctggagaagtgctgtgcagcagccgatccccacgagtgctacgcaaaggtgtttgacgagttcaagcctctggtggaggagccacagaacctgatcaagcagaattgtgagctgttcgagcagctgggcgagtataagtttcagaatgccctgctggtgagatacaccaagaaggtgccccaggtgtccacccctacactggtggaggtgtctaggaacctgggcaaggtcggcagcaagtgctgtaagcacccagaggcaaagaggatgccatgcgcagaggactatctgtccgtggtgctgaatcagctgtgcgtgctgcacgagaagaccccagtgtctgatagggtgaccaagtgctgtacagagtccctggtgaatagacggccctgcttctctgccctggaggtggacgagacatacgtgcctaaggagtttaacgccgagacattcaccttccacgccgatatctgtaccctgagcgagaaggagcgccagatcaagaagcagacagccctggtggagctggtgaagcacaagcccaaggccaccaaggagcagctgaaggccgtgatggacgattttgccgccttcgtggagaagtgctgtaaggccgacgataaggagacatgcttcgcagaggagggcaagaagctggtggcagcatcccaggccgccctgggcctgatgaccgccatcatcaaggagatcgtgagccgcaataagaggcgctatcaggaggatggcttcgacctggatctgacatatatctacccaaacatcatcgccatgggatttccagcagagaggctggagggcgtgtacaggaacaatatcgacgatgtggtgaggttcctggactccaagcacaagaaccactataagatctacaatctgtgcgccgagcggcactatgataccgccaagttcaactgtagagtggcccagtacccatttgaggaccacaatccaccccagctggagctgatcaagcccttttgcgaggacctggatcagtggctgagcgaggacgataatcacgtggcagcaatccactgcaaggcaggcaagggaaggacaggcgtgatgatctgtgcctatctgctgcacaggggcaagttcctgaaggcccaggaggccctggacttttacggcgaggtgcggaccagagataagaagggcgtgacaatccctagccagcggcggtacgtgtactattactcctacctgctgaagaaccacctggactaccgcccagtggccctgctgtttcacaagatgatgttcgagacaatccctatgttctccggcggcacatgcaacccacagtttgtggtgtgccagctgaaggtgaagatctatagctccaattctggccccaccaggcgcgaggataagttcatgtactttgagttcccccagcctctgccagtgtgcggcgacatcaaggtggagtttttccacaagcagaacaagatgctgaagaaggataagatgtttcacttctgggtgaatacctttttcatccccggccctgaggagacaagcgagaaggtggagaatggctccctgtgcgaccaggagatcgattctatctgtagcatcgagagggccgacaacgataaggagtacctggtgctgaccctgacaaagaatgacctggataaggccaacaaggacaaggccaatcgctatttttctcccaacttcaaggtgaagctgtacttcaccaagacagtggaggagcctagcaatccagaggcctctagctccaccagcgtgacacccgacgtgtccgataacgagcctgaccactatcggtactccgataccacagactctgatcctgagaacgagccatttgacgaagaccagcatactcagattactaaagtctaataagcttggatccatgcatctagagggccctattctatagtgtcacctaaatgctagagctcgctgatcagcctcgactgtgccttctagttgccagccatctgttgtttgcccctcccccgtgccttccttgaccctggaaggtgccactcccactgtcctttcctaataaaatgaggaaattgcatcgcattgtctgagtaggtgtcattctattctggggggtggggtggggcaggacagcaagggggaggattgggaagacaatagcaggcatgctggggatgcggtgggctctatggcttctgaggcggaaagaaccag

SEQ ID NO: 229 - DNA, 2406 bp, synthetic construct [sequence omitted]

SEQ ID NO: 230 - protein, 800 aa, synthetic construct
ERGGEAAAAAAAAAAAPGRGSESPVTISRAGNAGELVSPLLLPPTRRRRRRHIQGPGPVLNLPSAAAAPPVARAPEAAGGGSRSEDYSSSPHSAAAAARPLAAEEKQAQSLQPSSSRRSSHYPAAVQSQAAAERGASATAKSRAISILQKKPRHQQLLPSLSSFFFSHRLPDITAIIKEIVSRNKRRYQEDGFDLDLTYIYPNIIAMGFPAERLEGVYRNNIDDVVRFLDSKHKNHYKIYNLCAERHYDTAKFNCRVAQYPFEDHNPPQLELIKPFCEDLDQWLSEDDNHVAAIHCKAGKGRTGVMICAYLLHRGKFLKAQEALDFYGEVRTRDKKGVTIPSQRRYVYYYSYLLKNHLDYRPVALLFHKMMFETIPMFSGGTCNPQFVVCQLKVKIYSSNSGPTRREDKFMYFEFPQPLPVCGDIKVEFFHKQNKMLKKDKMFHFWVNTFFIPGPEETSEKVENGSLCDQEIDSICSIERADNDKEYLVLTLTKNDLDKANKDKANRYFSPNFKVKLYFTKTVEEPSNPEASSSTSVTPDVSDNEPDHYRYSDTTDSDPENEPFDEDQHTQITKVGGGGGSPCPAPELLGGPSVFLFPPKPKDTLMISRTPEVTCVVVDVSHEDPEVKFNWYVDGVEVHNAKTKPREEQYNSTYRVVSVLTVLHQDWLNGKEYKCKVSNKALPAPIEKTISKAKGQPREPQVYTLPPSRDELTKNQVSLTCLVKGFYPSDIAVEWESNGQPENNYKTTPPVLDSDGSFFLYSKLTVDKSRWQQGNVFSCSVMHEALHNHYTQKSLSLSPG

SEQ ID NO: 231 - DNA, 7961 bp, synthetic construct [sequence omitted]

SEQ ID NO: 232 - protein, 260 aa, synthetic construct
MEFGLSWLFLVAILKGVQCEIVLTQSPATLSLSPGERATLSCRASQSVSSYLAWYQQKPGQAPRLLIYDASNRATGIPARFSGSGSGTDFTLTISSLEPEDFAVYYCQQSSNWPRTFGQGTKVEIKGGGGSGGGGSGGGGSQVQLVESGGGVVQPGRSLRLDCKASGITFSNSGMHWVRQAPGKGLEWVAVIWYDGSKRYYADSVKGRFTISRDNSKNTLFLQMNSLRAEDTAVYYCATNDDYWGQGTLVTVSSHHHHHH

SEQ ID NO: 233 - DNA, 7258 bp, synthetic construct
  source 1..7258: mol_type = other DNA
actcttcctttttcaatattattgaagcatttatcagggttattgtctcatgagcggatacatatttgaatgtatttagaaaaataaacaaataggggttccgcgcacatttccccgaaaagtgccacctaaattgtaagcgttaatattttgttaaaattcgcgttaaatttttgttaaatcagctcattttttaaccaataggccgaaatcggcaaaatcccttataaatcaaaagaatagaccgagatagggttgagtgttgttccagtttggaacaagagtccactattaaagaacgtggactccaacgtcaaagggcgaaaaaccgtctatcagggcgatggcccactacgtgaaccatcaccctaatcaagttttttggggtcgaggtgccgtaaagcactaaatcggaaccctaaagggagcccccgatttagagcttgacggggaaagccggcgaacgtggcgagaaaggaagggaagaaagcgaaaggagcgggcgctagggcgctggcaagtgtagcggtcacgctgcgcgtaaccaccacacccgccgcgcttaatgcgccgctacagggcgcgtcccattcgccattcaggctgcgcaactgttgggaagggcgatcggtgcgggcctcttcgctattacgccagctggcgaaagggggatgtgctgcaaggcgattaagttgggtaacgccagggttttcccagtcacgacgttgtaaaacgacggccagtgagcgcgcctcgttcattcacgtttttgaacccgtggaggacgggcagactcgcggtgcaaatgtgttttacagcgtgatggagcagatgaagatgctcgacacgctgcagaacacgcagctagattaaccctagaaagataatcatattgtgacgtacgttaaagataatcatgcgtaaaattgacgcatgtgttttatcggtctgtatatcgaggtttatttattaatttgaatagatattaagttttattatatttacacttacatactaataataaattcaacaaacaatttatttatgtttatttatttattaaaaaaaaacaaaaactcaaaatttcttctataaagtaacaaaacttttatgagggacagcccccccccaaagcccccagggatgtaattacgtccctcccccgctagggggcagcagcgagccgcccggggctccgctccggtccggcgctccccccgcatccccgagccggcagcgtgcggggacagcccgggcacggggaaggtggcacgggatcgctttcctctgaacgcttctcgctgctctttgagcctgcagacacctggggggatacggggaaaaggcctccaaggcctactagtattatgcccagtacatgaccttatgggactttcctacttggcagtacatctacgtattagtcatcgctattaccatggtgatgcggttttggcagtacatcaatgggcgtggatagcggtttgactcacggggatttccaagtctccaccccattgacgtcaatgggagtttgttttggcaccaaaatcaacgggactttccaaaatgtcgtaacaactccgccccattgacgcaaatgggcggtaggcgtgtacggtgggaggtctatataagcagagctcgtttagtgaaccgtcagatcgcctggagacgccatccacgctgttttgacctccatagaagattctagagctagcgaattcgaatttaaatcggatccgcggccgcaaggatctgcgatcgctccggtgcccgtcagtgggcagagcgcacatcgcccacagtccccgagaagttggggggaggggtcggcaattgaacgggtgcctagagaaggtggcgcggggtaaactgggaaagtgatgtcgtgtactggctccgcctttttcccgagggtgggggagaaccgtatataagtgcagtagtcgccgtgaacgttctttttcgcaacgggtttgccgccagaacacagctgaagcttcgaggggctcgcatctctccttcacgcgcccgccgccctacctgaggccgccatccacgccggttgagtcgcgttctgccgcctcccgcctgtggtgcctcctgaactgcgtccgccgtctaggtaagtttaaagctcaggtcgagaccgggcctttgtccggcgctcccttggagcctacctagactcagccggctctccacgctttgcctgaccctgcttgctcaactctacgtctttgtttcgttttctgttctgcgccgttacagatccaagctgtgaccggcgcctacgctagacgccaccatggagagcgacgagagcggcctgcccgccatggagatcgagtgccgcatcaccggcaccctgaacggcgtggagttcgagctggtgggcggcggagagggcacccccaagcagggccgcatgaccaacaagatgaagagcaccaaaggcgccctgaccttcagcccctacctgctgagccacgtgatgggctacggcttctaccacttcggcacctaccccagcggctacgagaaccccttcctgcacgccatcaacaacggcggctacaccaacacccgcatcgagaagtacgaggacggcggcgtgctgcacgtgagcttcagctaccgctacgaggccggccgcgtgatcggcgacttcaaggtggtgggcaccggcttccccgaggacagcgtgatcttcaccgacaagatcatccgcagcaacgccaccgtggagcacctgcaccccatgggcgataacgtgctggtgggcagcttcgcccgcaccttcagcctgcgcgacggcggctactacagcttcgtggtggacagccacatgcacttcaagagcgccatccaccccagcatcctgcagaacgggggccccatgttcgccttccgccgcgtggaggagctgcacagcaacaccgagctgggcatcgtggagtaccagcacgccttcaagacccccatcgccttcgccagatcccgcgctcagtcgtccaattctgccgtggacggcaccgccggacccggctccaccggatctcgcgagggcagaggaagtcttctaacatgcggtgacgtggaggagaatcccggccctatgaccgagtacaagcccacggtgcgcctcgccacccgcgacgacgtccccagggccgtacgcaccctcgccgccgcgttcgccgactaccccgccacgcgccacaccgtcgatccggaccgccacatcgagcgggtcaccgagctgcaagaactcttcctcacgcgcgtcgggctcgacatcggcaaggtgtgggtcgcggacgacggcgccgcggtggcggtctggaccacgccggagagcgtcgaagcgggggcggtgttcgccgagatcggcccgcgcatggccgagttgagcggttcccggctggccgcgcagcaacagatggaaggcctcctggcgccgcaccggcccaaggagcccgcgtggttcctggccaccgtcggcgtctcgcccgaccaccagggcaagggtctgggcagcgccgtcgtgctccccggagtggaggcggccgagcgcgccggggtgcccgccttcctggagacctccgcgccccgcaacctccccttctacgagcggctcggcttcaccgtcaccgccgacgtcgaggtgcccgaaggaccgcgcacctggtgcatgacccgcaagcccggtgcctgaaatcaacctctggattacaaaatttgtgaaagattgactggtattcttaactatgttgctccttttacgctatgtggatacgctgctttaatgcctttgtatcagttaacttgtttattgcagcttataatggttacaaataaagcaatagcatcacaaatttcacaaataaagcatttttttcactgcattctagttgtggtttgtccaaactcatcaatgtatcttatcatgtctggaattgactcaaatgatgtcaattagtctatcagaagctatctggtctcccttccgggggacaagacatccctgtttaatatttaaacagcagtgttcccaaactgggttcttatatcccttgctctggtcaaccaggttgcagggtttcctgtcctcacaggaacgaagtccctaaagaaacagtggcagccaggtttagccccggaattgactggattccttttttagggcccattggtatggctttttccccgtatccccccaggtgtctgcaggctcaaagagcagcgagaagcgttcagaggaaagcgatcccgtgccaccttccccgtgcccgggctgtccccgcacgctgccggctcggggatgcggggggagcgccggaccggagcggagccccgggcggctcgctgctgccccctagcgggggagggacgtaattacatccctgggggctttgggggggggctgtccctgatatctataacaagaaaatatatatataataagttatcacgtaagtagaacatgaaataacaatataattatcgtatgagttaaatcttaaaagtcacgtaaaagataatcatgcgtcattttgactcacgcggtcgttatagttcaaaatcagtgacacttaccgcattgacaagcacgcctcacgggagctccaagcggcgactgagatgtcctaaatgcacagcgacggattcgcgctatttagaaagagagagcaatatttcaagaatgcatgcgtcaattttacgcagactatctttctagggttaatctagctgcatcaggatcatatcgtcgggtcttttttccggctcagtcatcgcccaagctggcgctatctgggcatcggggaggaagaagcccgtgccttttcccgcgaggttgaagcggcatggaaagagtttgccgaggatgactgctgctgcattgacgttgagcgaaaacgcacgtttaccatgatgattcgggaaggtgtggccatgcacgcctttaacggtgaactgttcgttcaggccacctgggataccagttcgtcgcggcttttccggacacagttccggatggtcagcccgaagcgcatcagcaacccgaacaataccggcgacagccggaactgccgtgccggtgtgcagattaatgacagcggtgcggcgctgggatattacgtcagcgaggacgggtatcctggctggatgccgcagaaatggacatggataccccgtgagttacccggcgggcgcgcttggcgtaatcatggtcatagctgtttcctgtgtgaaattgttatccgctcacaattccacacaacatacgagccggaagcataaagtgtaaagcctggggtgcctaatgagtgagctaactcacattaattgcgttgcgctcactgcccgctttccagtcgggaaacctgtcgtgccagctgcattaatgaatcggccaacgcgcggggagaggcggtttgcgtattgggcgctcttccgcttcctcgctcactgactcgctgcgctcggtcgttcggctgcggcgagcggtatcagctcactcaaaggcggtaatacggttatccacagaatcaggggataacgcaggaaagaacatgtgagcaaaaggccagcaaaaggccaggaaccgtaaaaaggccgcgttgctggcgtttttccataggctccgcccccctgacgagcatcacaaaaatcgacgctcaagtcagaggtggcgaaacccgacaggactataaagataccaggcgtttccccctggaagctccctcgtgcgctctcctgttccgaccctgccgcttaccggatacctgtccgcctttctcccttcgggaagcgtggcgctttctcatagctcacgctgtaggtatctcagttcggtgtaggtcgttcgctccaagctgggctgtgtgcacgaaccccccgttcagcccgaccgctgcgccttatccggtaactatcgtcttgagtccaacccggtaagacacgacttatcgccactggcagcagccactggtaacaggattagcagagcgaggtatgtaggcggtgctacagagttcttgaagtggtggcctaactacggctacactagaaggacagtatttggtatctgcgctctgctgaagccagttaccttcggaaaaagagttggtagctcttgatccggcaaacaaaccaccgctggtagcggtggtttttttgtttgcaagcagcagattacgcgcagaaaaaaaggatctcaagaagatcctttgatcttttctacggggtctgacgctcagtggaacgaaaactcacgttaagggattttggtcatgagattatcaaaaaggatcttcacctagatccttttaaattaaaaatgaagttttaaatcaatctaaagtatatatgagtaaacttggtctgacagttaccaatgcttaatcagtgaggcacctatctcagcgatctgtctatttcgttcatccatagttgcctgactccccgtcgtgtagataactacgatacgggagggcttaccatctggccccagtgctgcaatgataccgcgagacccacgctcaccggctccagatttatcagcaataaaccagccagccggaagggccgagcgcagaagtggtcctgcaactttatccgcctccatccagtctattaattgttgccgggaagctagagtaagtagttcgccagttaatagtttgcgcaacgttgttgccattgctacaggcatcgtggtgtcacgctcgtcgtttggtatggcttcattcagctccggttcccaacgatcaaggcgagttacatgatcccccatgttgtgcaaaaaagcggttagctccttcggtcctccgatcgttgtcagaagtaagttggccgcagtgttatcactcatggttatggcagcactgcataattctcttactgtcatgccatccgtaagatgcttttctgtgactggtgagtactcaaccaagtcattctgagaatagtgtatgcggcgaccgagttgctcttgcccggcgtcaatacgggataataccgcgccacatagcagaactttaaaagtgctcatcattggaaaacgttcttcggggcgaaaactctcaaggatcttaccgctgttgagatccagttcgatgtaacccactcgtgcacccaactgatcttcagcatcttttactttcaccagcgtttctgggtgagcaaaaacaggaaggcaaaatgccgcaaaaaagggaataagggcgacacggaaatgttgaatactcat

SEQ ID NO: 234 - DNA, 130 bp, synthetic construct
  source 1..130: mol_type = other DNA
tttaaacgtgtgtatacggacgcgccgggccagtcggccaacacaacccaccggagcggtagccgcgtttggctgtggggtgggtggttccgccttgcgtgagtgtcctttcgaccccccctcccccggg

SEQ ID NO: 235 - DNA, 813 bp, synthetic construct
  source 1..813: mol_type = other DNA
atggagttcgggctttcatggctcttcctggtggccatactcaagggggtgcagtgtgagatcgtcttgacccagagccccgcaacacttagcctgtcaccaggggagagagctacgttgtcctgccgggccagtaagggggtcagcacttccggatatagttacctgcactggtaccagcaaaagcccggacaagcccctagactgttgatctatctcgcctcttacctggagagcggagtccccgctcggttctcaggatctgggagcgggactgactttaccctgactatcagcagcctggaacccgaagacttcgcagtgtattattgtcagcactcacgcgaccttcctctgaccttcggcggcggaacaaaggtagaaataaagggggggggaggcagcggcggtggtggaagtgggggcgggggctctcaggtgcaattggtgcagtctggcgtcgaggtaaaaaagcccggcgcgagtgtgaaagtgagctgcaaagcctccggttatacctttaccaattattacatgtattgggtgaggcaggcaccaggccaggggcttgagtggatgggcggtatcaatccttccaatgggggcactaattttaacgaaaagttcaagaaccgcgtgactctgacaacagattcttccactactaccgcatatatggaattgaaatccctgcagtttgacgacaccgccgtttactattgcgctagacgggactacaggttcgatatgggattcgactactggggccagggcactacagtaaccgtgagcagccaccaccaccaccaccac

SEQ ID NO: 236 - protein, 271 aa, synthetic construct
MEFGLSWLFLVAILKGVQCEIVLTQSPATLSLSPGERATLSCRASKGVSTSGYSYLHWYQQKPGQAPRLLIYLASYLESGVPARFSGSGSGTDFTLTISSLEPEDFAVYYCQHSRDLPLTFGGGTKVEIKGGGGSGGGGSGGGGSQVQLVQSGVEVKKPGASVKVSCKASGYTFTNYYMYWVRQAPGQGLEWMGGINPSNGGTNFNEKFKNRVTLTTDSSTTTAYMELKSLQFDDTAVYYCARRDYRFDMGFDYWGQGTTVTVSSHHHHHH

SEQ ID NO: 237 - DNA, 795 bp, synthetic construct
  source 1..795: mol_type = other DNA
atggagtttggcctcagctggttgtttctggttgcaattctgaagggagtgcagtgtgatattcagatgacccaatctccaagcagcctcagtgcttccgtgggcgatagagtcaccatcacgtgccgcgcctcccaggacgtctcaacggccgttgcctggtaccagcagaagcctggcaaggccccaaaactgttgatctactccgccagcttcctttacagtggggtgccctcccggtttagcggaagcggaagcggaaccgacttcacactcacaattagttccctgcagccggaagattttgccacttactactgccagcagtatctgtatcatcccgccacattcggtcagggcacaaaggtggaaattaagggcggcggcgggtccggcggcggcggcagcgggggtggaggaagtgaagtccaactcgtcgagtccggtggcggcctggtgcagcccggcggctccctcaggttgtcttgcgctgcatcagggttcacgttctccgactcttggatccactgggtacggcaggctccagggaaagggctggaatgggtggcttggatctccccttacgggggaagtacatactacgctgacagcgtgaaagggcggttcaccattagcgccgatactagcaagaatactgcttatctccaaatgaacagcctgagagctgaagataccgccgtgtactattgtgccaggcgacactggcccggaggcttcgactactggggacaggggacactcgtcactgtgtcagcacaccaccaccatcaccat

SEQ ID NO: 238 - protein, 265 aa, synthetic construct
MEFGLSWLFLVAILKGVQCDIQMTQSPSSLSASVGDRVTITCRASQDVSTAVAWYQQKPGKAPKLLIYSASFLYSGVPSRFSGSGSGTDFTLTISSLQPEDFATYYCQQYLYHPATFGQGTKVEIKGGGGSGGGGSGGGGSEVQLVESGGGLVQPGGSLRLSCAASGFTFSDSWIHWVRQAPGKGLEWVAWISPYGGSTYYADSVKGRFTISADTSKNTAYLQMNSLRAEDTAVYYCARRHWPGGFDYWGQGTLVTVSAHHHHHH

SEQ ID NO: 239 - DNA, 810 bp, synthetic construct
  source 1..810: mol_type = other DNA
atggagttcggcctgtcttggctgttcctcgtggcaatcttgaaaggcgtgcagtgcgatatccagatgacacagtccccttcatcactgtctgcttccgtgggggatagggtgaccataacatgctctgccagccaagacataagcaattatcttaattggtatcagcagaagcccggtaaggctccaaaggtactgatctattttacaagttccctgcattctggcgttccctccagattttcagggtccggctccgggacagacttcaccctgactatcagcagcctccagcctgaagatttcgctacctattactgccagcagtactctacagtgccatggacttttgggcagggcacaaaagtcgaaattaaaggaggtgggggcagtggcggtggtggaagtggtggtggcggcagcgaggtgcagctggtggagagtggcggtgggctggtgcagcccggcggatcactgcggctttcatgcgcagcttctggctatacctttaccaactatgggatgaactgggtgaggcaggcccctggcaaggggctggagtgggtgggctggattaacacctatacgggcgaaccaacttacgccgcagattttaagaggagattcacctttagcctggatacttcaaaatcaacagcttatctgcagatgaattccctgcgggcagaggataccgctgtgtattactgcgctaagtaccctcattattatgggtcaagtcactggtatttcgacgtttggggacaggggacactggtcaccgtgagttcacaccatcaccaccaccac

SEQ ID NO: 240 - protein, 270 aa, synthetic construct
MEFGLSWLFLVAILKGVQCDIQMTQSPSSLSASVGDRVTITCSASQDISNYLNWYQQKPGKAPKVLIYFTSSLHSGVPSRFSGSGSGTDFTLTISSLQPEDFATYYCQQYSTVPWTFGQGTKVEIKGGGGSGGGGSGGGGSEVQLVESGGGLVQPGGSLRLSCAASGYTFTNYGMNWVRQAPGKGLEWVGWINTYTGEPTYAADFKRRFTFSLDTSKSTAYLQMNSLRAEDTAVYYCAKYPHYYGSSHWYFDVWGQGTLVTVSSHHHHHH

SEQ ID NO: 241 - DNA, 162212 bp, synthetic construct
  source 1..162212: mol_type = other DNA
agtccccgtcctgccgcgcgggggcgggcgcgggaaaaaagccgcgcgggggcggacgcggggaagcgggcccgcggcgcgcggggggaggggcggcgcccgcgggggagcggccggttccgggggagggacggggaagggggcgcgcggggctgccctgccgcccgcccccggggaggggcggcgcccgcgggggagcggccgggtccgggggcgggccgggagcgccgggcgcggggaagggggcgcgcggggccgccctgccgcccgcccgccgccgccgcccgccttcgcgcccccccccaaaaacacccccccgggggttgactccccgggggaaaaaaggcggggcggggtggtccccgtcctgccgccgccccttaagagggcccgcaacacggcccgggctgcgcacgccagccgggacgggtgagttcgctaggcaagcacggactggcggttacacgtgcatgcgtgccgagtgaactctcccgccccgacgcgctccggctccgggcctacgccgagcccagccgcccgcccgatgtacgggccagatatacgcgttgacattgattattgactagttattaatagtaatcaattacggggtcattagttcatagcccatatatggagttccgcgttacataacttacggtaaatggcccgcctggctgaccgcccaacgacccccgcccattgacgtcaataatgacgtatgttcccatagtaacgccaatagggactttccattgacgtcaatgggtggactatttacggtaaactgcccacttggcagtacatcaagtgtatcatatgccaagtacgccccctattgacgtcaatgacggtaaatggcccgcctggcattatgcccagtacatgaccttatgggactttcctacttggcagtacatctacgtattagtcatcgctattaccatggtgatgcggttttggcagtacatcaatgggcgtggatagcggtttgactcacggggatttccaagtctccaccccattgacgtcaatgggagtttgttttggcaccaaaatcaacgggactttccaaaatgtcgtaacaactccgccccattgacgcaaatgggcggtaggcgtgtacggtgggaggtctatataagcagagctctctggctaactagagaacccactgcttactggcttatcgaaattaatacgactcactatagggagacccaagcttggtaccgagctcggatccactagtaacggccgccagtgtgctggaattctgcagatatcgaattcccgccgccaccatgaagtgggtcacctttattagtctgctgtttctgttttcttccgcttactcacgaggggtctttaggagagatgctcacaaatcagaggtggcccaccggtttaaggacctgggcgaggagaacttcaaggccctggtgctgatcgcctttgcccagtatctgcagcagtgccccttcgaggatcacgtgaagctggtgaatgaggtgaccgagtttgccaagacatgcgtggccgacgagtctgccgagaactgtgataagagcctgcacaccctgttcggcgacaagctgtgcaccgtggccacactgcgggagacatacggcgagatggccgattgctgtgccaagcaggagcccgagagaaatgagtgctttctgcagcacaaggacgataacccaaatctgccaaggctggtgcgccctgaggtggacgtgatgtgcaccgcctttcacgataacgaggagacattcctgaagaagtatctgtacgagatcgcccggagacacccatatttctacgcccccgagctgctgttctttgccaagagatataaggccgcctttaccgagtgctgtcaggcagcagacaaggcagcatgcctgctgcctaagctggacgagctgagggatgagggcaaggccagctccgccaagcagcgcctgaagtgtgccagcctgcagaagtttggcgagagggccttcaaggcctgggcagtggcaaggctgtctcagagatttccaaaggccgagttcgccgaggtgagcaagctggtgaccgatctgacaaaggtgcacaccgagtgctgtcacggcgacctgctggagtgcgcagacgatagagccgatctggccaagtacatctgtgagaaccaggacagcatctctagcaagctgaaggagtgctgtgagaagcccctgctggagaagtcccactgcatcgccgaggtggagaatgacgagatgccagcagatctgccttctctggcagcagacttcgtggagagcaaggacgtgtgcaagaactatgccgaggccaaggacgtgttcctgggcatgttcctgtatgagtacgccaggcgccacccagactattccgtggtgctgctgctgcggctggccaagacctacgagacaaccctggagaagtgctgtgcagcagccgatccccacgagtgctacgcaaaggtgtttgacgagttcaagcctctggtggaggagccacagaacctgatcaagcagaattgtgagctgttcgagcagctgggcgagtataagtttcagaatgccctgctggtgagatacaccaagaaggtgccccaggtgtccacccctacactggtggaggtgtctaggaacctgggcaaggtcggcagcaagtgctgtaagcacccagaggcaaagaggatgccatgcgcagaggactatctgtccgtggtgctgaatcagctgtgcgtgctgcacgagaagaccccagtgtctgatagggtgaccaagtgctgtacagagtccctggtgaatagacggccctgcttctctgccctggaggtggacgagacatacgtgcctaaggagtttaacgccgagacattcaccttccacgccgatatctgtaccctgagcgagaaggagcgccagatcaagaagcagacagccctggtggagctggtgaagcacaagcccaaggccaccaaggagcagctgaaggccgtgatggacgattttgccgccttcgtggagaagtgctgtaaggccgacgataaggagacatgcttcgcagaggagggcaagaagctggtggcagcatcccaggccgccctgggcctgatgaccgccatcatcaaggagatcgtgagccgcaataagaggcgctatcaggaggatggcttcgacctggatctgacatatatctacccaaacatcatcgccatgggatttccagcagagaggctggagggcgtgtacaggaacaatatcgacgatgtggtgaggttcctggactccaagcacaagaaccactataagatctacaatctgtgcgccgagcggcactatgataccgccaagttcaactgtagagtggcccagtacccatttgaggaccacaatccaccccagctggagctgatcaagcccttttgcgaggacctggatcagtggctgagcgaggacgataatcacgtggcagcaatccactgcaaggcaggcaagggaaggacaggcgtgatgatctgtgcctatctgctgcacaggggcaagttcctgaaggcccaggaggccctggacttttacggcgaggtgcggaccagagataagaagggcgtgacaatccctagccagcggcggtacgtgtactattactcctacctgctgaagaaccacctggactaccgcccagtggccctgctgtttcacaagatgatgttcgagacaatccctatgttctccggcggcacatgcaacccacagtttgtggtgtgccagctgaaggtgaagatctatagctccaattctggccccaccaggcgcgaggataagttcatgtactttgagttcccccagcctctgccagtgtgcggcgacatcaaggtggagtttttccacaagcagaacaagatgctgaagaaggataagatgtttcacttctgggtgaatacctttttcatccccggccctgaggagacaagcgagaaggtggagaatggctccctgtgcgaccaggagatcgattctatctgtagcatcgagagggccgacaacgataaggagtacctggtgctgaccctgacaaagaatgacctggataaggccaacaaggacaaggccaatcgctatttttctcccaacttcaaggtgaagctgtacttcaccaagacagtggaggagcctagcaatccagaggcctctagctccaccagcgtgacacccgacgtgtccgataacgagcctgaccactatcggtactccgataccacagactctgatcctgagaacgagccatttgacgaagaccagcatactcagattactaaagtctaataagcttggatccatgcatctagagggccctattctatagtgtcacctaaatgctagagctcgctgatcagcctcgactgtgccttctagttgccagccatctgttgtttgcccctcccccgtgccttccttgaccctggaaggtgccactcccactgtcctttcctaataaaatgaggaaattgcatcgcattgtctgagtaggtgtcattctattctggggggtggggtggggcaggacagcaagggggaggattgggaagacaatagcaggcatgctggggatgcggtgggctctatggcttctgaggcggaaagaaccagggttgaaccggcgagggcggcctcggccggcggagccccggagctccgaaggtctgcgcgaggccgctctccgaagagacgatgggagccccgcgtatatatccgcgagggcccggcgccgccccgccgctccgcccgccccagggggcggcgccggccaaccgcgcgccgccgcgcgggcccggactccgccccggcgaccgccccgcgccggcttcccggtatggtaattagaaacttttaataggcggtcccggccgccatccccgctcatggtaattagcaacttttaatgggccggcgttcccgctcgcggtaattagcagcttttaacgggccgccattcccgcttatggtaattaaaaacgttcggacggcccctcgctccccgcgtaattactccctcggggttccgggttatgctgattactttcttggcagaacacgcagagcctcgcgcgccgccgggtgggtgggctgatcggcccctattggtcccctgggcttcctagtatgctaatgaatttctccccgggggcgggcaccactcagggccgcgccggcggggcgccggggggactcccatctgcgtcggcggggggcggcgcatgctaatggggttcttggagtacacccggttggtccccggggacggggccgccccgagagggggggattccctccctccgcccccgccggggcgcgcggctattgggggaatcgtaaatgccgcccctttgggggagtggataggcgccgggtataaggcagccccgtgtgacggtcgggccgcattcgcaccccggcactgcgagcgacggagcggcggcccggcgggaggaggagacccggagagacagagactaaaacccggcaagagagagaccgcgggccgccgtctcgagtctaccctaccccggctcatggaaccccggcccggcacgagctcccgggcggaccccggccccgagcggccgccgcggcagacccccggcacggtgagagggcgacccccgggtctcaggcccccccttttccccggaccacccggctgcgggttgggggtggtcgcgggcggtgggctcgggggcggggacgcttgacggggccgacccccggcccgcttaagcggtcgggggacccccgtgggccgtgcgccgccccccgaccctttggggggcgagggaggcagggaggagcccgagagcgggggacagggggggagacgaggggtcggaatccaaaggacgcagaccacctttggttacggacccctttctcccccccttccgaacaaaaagcagcgggcggggggccggggtgagggagggacacgggggacacggcacgggggtcccgcctcacgccccgcgccctctaaatcccccccgtttctttgtcaagcagcccgccgccccgcacgcctgggggatgctcaacgacatgcagtggctcgccagcagcgactcggaggaggagaccgaggtgggaatctctgacgacgaccttcaccgcgactccacctccgaggcgggcagcacggacacggagatgttcgaggcgggcctgatggacgcggccacgcccccggcccggcccccggccgagcgccagggcagccccacgcccgccgacgcgcagggatcctgtgggggtgggcccgtgggtgaggaggaagcggaagcggaagcgggaggggggggcgacgtgtgtgccgtgtgcacggacgagatcgccccgcccctgcgctgccagagttttccctgcctgcaccccttctgcatcccgtgcatgaagacctggattccgttgcgcaacacgtgtcccctgtgcaacaccccggtggcgtacctgatagtgggcgtgaccgccagcgggtcgttcagcaccatcccgatagtgaacgacccccggacccgcgtggaggccgaggcggccgtgcggtccggcacggccgtggactttatctggacgggcaacccgcggacggccccgcgctccctgtcgctggggggacacacggtccgcgccctgtcgcccacccccccgtggcccggcacggacgacgaggacgatgacctggccgacggtgagggcgggcgggggtcgggcgggggtcgggcgggggtcgggcgggggtcgggcgggggtcgggcgggggtcgggcgggggtcgggcgggggtcgggcgggggtcgggcactaaccgggggttcccgtctctgtctccctctgcagtggactacgtcccgcccgccccccgaagagcgccccggcgcgggggcggcggtgcgggggcgacccgcggaacctcccagcccgccgcgacccgaccggcgccccctggcgccccgcggagcagcagcagcggcggcgccccgttgcgggcgggggtgggatctgggtctgggggcggccctgccgtcgcggccgtcgtgccgagagtggcctctcttccccctgcggccggcggggggcgcgcgcaggcgcggcgggtgggcgaagacgccgcggcggcggagggcaggacgccccccgcgagacagccccgcgcggcccaggagccccccatagtcatcagcgactctcccccgccgtctccgcgccgccccgcgggccccgggccgctctcctttgtctcctcctcctccgcgcaggtgtcctcgggccccggggggggaggtctgccacagtcgtcggggcgcgcggcgcgcccccgcgcggccgtcgccccgcgcgtccggagtccgccccgcgccgccgccgcccccgtggtgtctgcgagcgcggacgcggccgggcccgcgccgcccgccgtgccggtggacgcgcaccgcgcgccccggtcgcgcatgacccaggctcagaccgacacccaagcacagagtctgggccgggcaggcgcgaccgacgcgcgcgggtcgggagggccgggcgcggagggaggacccggggtcccccgcggcaccaacacccccggtgccgccccccacgccgcggagggggcggcggcccgcccccggaagaggcgcgggtcggactcgggccctgcggcctcgtcctccgcctcttcctccgccgccccgcgctcgcccctcgccccccagggggtgggggccaagagggcggcgccgcgccgggccccggactcggactcgggcgaccgcggccacgggccgctcgccccggcgtccgcgggcgccgcgcccccgtcggcgtctccgtcgtcccaggccgcggtcgccgccgccgcctcctcttcctcctcctcctcttcctcctcctcctcctcctcctcctccgcatcttcctctgcgggcggggctggtgggagcgtcgcgtccgcgtccggcgctggggagagacgagaaacctccctcggcccccgcgctgctgcgccgcgggggccgaggaagtgtgccaggaagacgcgccacgcggagggcggccccgagcccggggcccgcgacccggcgcccggcctcacgcgctacctgcccatcgcgggggtctcgagcgtcgtggccctggcgccttacgtgaacaagacggtcacgggggactgcctgcccgtcctggacatggagacgggccacataggggcctacgtggtcctcgtggaccagacggggaacgtggcggacctgctgcgggccgcggcccccgcgtggagccgccgcaccctgctccccgagcacgcgcgcaactgcgtgaggccccccgactacccgacgccccccgcgtcggagtggaacagcctctggatgaccccggtgggcaacatgctctttgaccagggcaccctggtgggcgcgctggacttccacggcctccggtcgcgccacccgtggtctcgggagcagggcgcgcccgcgccggccggcgacgcccccgcgggccacggggagtagggggagctaacactcggcttgctgcccgaagggaagccgccccccaccggaccaccggccgaggcgcctcgggggcagggggaggtggggggggaagacggggaggagacaggaagtgggggtgggagcggggggggggacggacacggccccgaacagcaacacacaccagcattttgttatggactttctggccttgttgaaaacttgaggaaaaaaaaaactttatatttataaaaattttacaataaagttttgtgatgcttttgacacactttgttgttggcctttgatgcagctcccccgcgcaggggggccggggatggggggggaaaagggaggaggaggaggggggcgggcacgagaagccgcccccacccccgaggcctgttggtctttatcatagaacagagccggggcccggcctgcgttctggctccctgtcttggtgggtgggcgggctggctggcgggtaaaaaaagagtgtgtccgtgttgacagggaggggggcccgatcgtgcagagcacgcacgtctggccggccagaccctgggggtggtgggcaggagtgggagggcgcctggctcggggagggaggagggggggtcagccgcaccaccggcgcgaagccaggggccagggaactttgatagagaggggggaaagtggggcgggggcgagggcggttgaatcacaacgcatgcacgccctctgcccccggggacgggtgggaggaaggaggaggaggagggagaagagaagacccgaggcatgcacccgcacttacgcccgtgcccacccccgccccggcgcccaccccgcccgcacacctgcccgccacgcccgcccctcctcaccctggctgggagaaaggaggaggagcaggaagaggagacccgaggcatgcaaccgcactcaccccaccccgcccgcacacctgcccgccacgcccgcccctccttaccctggctgcggggagactcccatcggggcgagggggctcgcgcgttcgcaacaccacaccacaccacacggcccaccacaacacggcccaccacgacacaacacgacacgacgcgttttgcggggcatgcaagtcgacacaccgcgcgcgtgcctacctttccctagcggccccggccccccggcccgtttccttccgccaccactaccaccaccacccccccgcccgcgcccacgcggtagaggaaggggacgggcgccacacccacggctgtggccgggcacgcgcctttggggttgttgggggggggtgaccggcgcgtgggggcggtgggcgtatgggcccgacccgcgcctgccccccctgggaacgacgcccccggacgacaccacggggggggggaaacgggggtgggtggaagggaagaggaaggagaaagggggggtggatccgaacacgccggatccgcgaaaataataacaaaacaaaaacagaaacaaaaacaaaaacacctagaaaaaaaggatacgggttggctcgcgggcggtgcggctgacctgcctgccctttctgggacccccgcctcgtgtttcttgaaagggggaggaagaacagttttcccccaacccctgctctcttctctcttccgcccgccccccctctcccgccgcctcagcagaagctcacctgtacgaccctaaacctacctgcgagaacgcgcggcgttcgaggggcgcgctctctcacacgagacacacgcaggcgcgccccccccccggagcctgggtcccccggcggacggctcacgcggcgcggcgtctcggtgggacgcggggagagggcggcggcgggggggggaaatgtgaggagagcgagacagcgagccagagagagagagaaggaagagggaaggggcgcggcgggacgggggaagacgaggagaagggaaggggcgagggtcgggcccgggagcggggcggccgggagggagaagaaacggaacgcggaaacgccgccggcgcggcccggggccccggggcccccgcgctccgccgggggcccgggccggaccgccgggcgggggacgccttccgaccggcgccgggcggctacccgggacccccggccgggaatcgaaaaaagcctccgggggcccctttcgcgcctttcgcgaacgcgcggcgccggagggggcggccgccgaggtgcgggggcccctccggccggggcgcacctcggcggccaagccccggcccgcccgggggtccccgaggcagaggcggaccctcggaggcgcggaagaagacgggaggcgggggaaaaaagggggaagagagggggaggtagggaggggagaggagaagggcgcgccggtgcgcggagcagccttccttctccggagtccctctcgatcggcggcgggcccctgtgttcgttgctgccgcgcccccggttttataaagacagggatgacgcagcagaaatgcccacaacaacacgcgggcggggctcgggctctccggcggcttaatggatctccgggcacggcgcccgcaaccgcagagcactcggctggcgcgcggcacgcgggcgtgggggtgcttaatggaagggcgtggggccggccgccggatgcccgcgggggcctaatgcggcgggaggcgtgggccgctggcgccgcggcccgtctgctggcccgcggccacgtaaacaatgacacaggggttctctccgccgcggccggcgcggggcgttgccggcccggcccggccccggagcccgcggcgctgctcggctgcggccgcgggctccgggggctccgggggctccgggggctccgggggctccgggggctccgggggctccgggggctccgggggctccgggggctccgcactctgcccggctcgccccgtcccccctcttgctgcttttccgcgcgcctctctttcccgttgctttccctctccccccccccccctctctctctctctctctctctctctctctctctctctccgccatcctcccgcccggccgcccactccccgctcggcctctccggctgcggtgcttgggtctccttcgtcgggcggcgggggggggggcgtcgggactcgcggagggccggagaatggaaggcgaggggatgcaggaggaggatcgggactccccatcttctgcccttccatcctccgtttttccgctttccaccgccgccgccaccccccccccttccttcgcccgcccgcctcgccccggacccctcccccccgtgtttcccccatcgttcaccaccacgccccccaccgcgccttggctgtttggggggtggcggcggtggtcggcgtgctgccggaggctgcgggcgcggggtaggtgggtgggcgggtggtggggggggcccggctgcgtctcgccgcgatcccgccggtggggcgcggcggcggtcggggtggggggagagtgtcgtgggtgtgttttcgtgtcccccaccaccactcccaccccgaccgccgccgcgcccgcgtttctgccgcccgcgcgctcctgtgtggaccccggggtgggcggcggggggggtgccgtgggtgtggcggcggggcgcgggccggggccggggctcgctggtctgccgaagtaaagaaaagatcgccaccgtgtgttcgtctgtgtgttctgcgcggcgccggggcccccctgccgggcggggcggtggggcggggccggggtcgcggcggggaaggaaggaaaggccccggaagcgccgggagggggcgccggcgcgacgcgggcggccgggcgggggcgcgcggcggccgggagggggcgcgctttccccgcgtcgcccctcgggttcccaagacctatcacgtgtgcgcaggggaggggaggacgcgggggaggggaggacgcgggggaggggaggacgcgggggaggggaggacgcgggggaggggaggacgcgggggaggggaggacgcgggggaggggaggacgcgggggaggggaggacgcgggggatatataaagcggtagaaagcgcgggaatgggcatattggacccgcgtgattcggttgctcgcggttgtcttgtttggacgttttttatgcgggaacaagggggcttaccggttacactgtccgctcgctatggggttcgtctgtctgtttgggcttgtcgttatgggagcctggggggcgtggggtgggtcacaggcaaccgaatatgttcttcgtagtgttattgccaaagaggtgggggacatactaagagtgccttgcatgcggacccccgcggacgatgtttcttggcgctacgaggccccgtccgttattgactatgcccgcatagacggaatatttcttcgctatcactgcccggggttggacacgtttttgtgggataggcacgcccagagggcgtatctggttaacccctttctctttgcggcgggatttttggaggacttgagtcactctgtgtttccggccgacacccaggaaacaacgacgcgccgggccctttataaagagatacgcgatgcgttgggcagtcgaaaacaggccgtcagccacgcacccgtcagggccgggtgtgtaaactttgactactcacgcactcgccgctgcgtcgggcgacgcgatttacggcctgccaacaccacgtcaacgtgggaaccgcctgtgtcgtcggacgatgaagcgagctcgcagtcgaagcccctcgccacccagccgcccgtcctcgccctttcgaacgcccccccacggcgggtctccccgacgcgaggtcggcgccggcatactcgcctccgacgcaactagccacgtctgcatcgcaagccaccctgggtcgggagcaggatatccgacccgtctagcggccgggtcggctgtccagcgtcgtcgccctagaggctgtccgccgggcgtgatgttttccgcatctacgacccccgaacagcccctggggctgtcgggcgatgcgacgccgcccctgccgacttccgtgcccctggactgggccgcgtttcggcgcgcgtttctgatcgacgacgcctggcggcccctgttggagccggagctcgcgaaccccctaaccgcgcgcctcctcgcggagtatgaccgtcggtgccagaccgaagaggtgctgccgccgcgggaggatgtgttctcctggacgcggtattgtacccccgacgacgtgcgcgtggttatcatcgggcaggacccgtaccaccatcccggccaggcgcacggcctggcgtttagcgtgcgtgcggatgtgccggtgcctccgagtctacggaacgtgctggcggcggttaaaaattgttaccccgacgcgcgcatgagcggccgcggctgcctggaaaagtgggctcgcgacggcgtgctgttgttgaacacgaccctgaccgtcaagcgcggggcggcggcgtcccactccaagcttggatgggaccgctttgtgggcggggtggtccgacggctggccgcgcgccgcccgggcctggtctttatgctctggggcgcccatgcccagaacgcgatcaggcccgaccctcgccaacactacgtcctcaagttttctcacccgtcgcccctctccaaggtcccgtttgggacgtgccagcatttcctcgccgcgaatcgctacctcgaaacccgggacattatgcctatcgactggtcggtataagatgccgacatccggggtcttgatttacgagggggcaattaataaagactgttgatggttaaatctcgggtctcataccggtccgtgatgtcgggcgtgggggaagagagggtcccctctgcgtttactatccttgcctcgtggggctggacgtttgcaccccagaaccatgatcctggcgcgtcgccgaatacgacgcccatagagtcgattgcggggaccgcaccggacgcgcacgtggggcctctcgacggagagccggaccgggatgcgatctccccgcttacgtcgagcgtggccggcgacccgccgggggcggacggcccctacgtcacctttgatactctgtttatggtatcttcgatcgacgaactggggcgccgccagctcacggatacgatccgtaaggacctgcggctgtcgctggccaagttcagcatcgcgtgtaccaagacctcgtcgttttcggggacggccgcgcgccagcgcaagcgcggagcaccgccgcaacgcacatgcgtaccacgcagcaacaagagcctccagatgttcgttttgtgcaagcgcgccaacgccgcgcaggtgcgcgagcagctgcgggcggttattcggtcgcgcaagccgcgcaagtattacacgcggtcctcggatgggcggctctgcccggccgtccccgtgtttgtacacgagtttgtttcgtccgaacccatgcgcctccatcgagataacgtcatgctgtctacggaaccagactaagcacccccgccgtcccctttcttttccccctacccttccccccgttactgatgtgttgtgacgtttcaataaataacacgtagcttattttgttggatgatggattgattgattttattgaccgttcgttcgcccggcggtgccgtcgccgcgcgcagagggaatatgcaagcgggcggggtggggaggaaagaaggtttcaggttccgggggttgggtctgcgtcgtccagggtggggctgatctgaatttcccgcagaacctcgaccagtaggtctgttgtgtttgctgggaactcgcccgccgttggggatacgggggcggggggtgtggttgggcggacgtccaggggtgcgttatcgcacccccgcgccgcctcgggggccgtcccgtagatcgttgcggtgatgtagatggtgtccggggtccacaccaccgtcaggatgccggccgtcgcactccggacgctttcgccgtgcgatgagctgacccaggagtcaaaggggtacgcgtacatatgggcgtcccaccagcgctccagcctctgggtactagcgcgtcctataaagcggtatgcgcaaaattcggcacgacagtcgataatcaccagcagcccgatgggggtgtgttgtatcaccacgcctccgcggggcaggcggtcctggcgcgctcgaccccgcgtcagaaccgcgcgcgtccctgactcaaacacgtgcaccacctgtgccgcgtccggcagcgcgctcgttagcgacgccctggggtgatgtaggctgtacgcgatggtcgtctgggggttccccatgtctcgggggggtgggggtgaatgtcacccggcccgggtgcggtgggaacgcgagggaatggagggttaatagacaatgaccacattcggatcgcgtagagcagatagtatgtgctcgctaatgacgtcatcgcgttcgtggcgctcccggagcgggtttagattcatgtgcaggaactcggatgaggtggtgcgggacatggctacgtacgcgctgtttaggcgcaggtttccgggcgtgaagcatatggcgaccttgtccagactgagcccctgggagcgcgtgatggtcatcgcgagtttggagctgatgccgtagtcggcgttgatggccatggccagctccgtggagtcgatcgactcgacaaactcactgatgttggtattgacgacagacatgaagccgtgctggtcccgcaggacgatgtagggcaggggggactcctccaagaactcggccacgccggccgtcgcgtgccgccgccgcagctcctccgcgaacgcgaacacccgggtgtacgtgtaccccatcagcgtgtagttgtccgtctgcagggccacggacatcagccccccgcgcggcgagccggttagcagctcgcagccccggaagatgacattgtccacgtaggtgctgaagggggcgctctcaaacacctccccgaagagctcccgtaggataaggtatcgccccagaaaggccctcttcaggagcccaaactgggcgtggacggccgcggtggtttccggctcttcgagggcgtagtggcagtagaacacgtccagctgctgttcgtccagcccggcgaagataacgtcaaggtcgtcgtcggggaagtcgtccgggcccccgtcccgcgggcccaggtgcttaaaattgaacgcacgctcccccggagagcggtcgctggtgtcggcggccctggttgccgatgcgccggcggcgtcccggcgtagcgacaggagttctgccgtcagctcccctaggcggccgtaggccagggtcctctgggtcgcgtccaggccggggcgctggagaaagttgtaaaagtgaatcagcccgccgaacatgagccgcgacaggaaccggtaggcgaactccaccgaggtctccccctgggtcttcacgaagctgtcgtcgcgcagcacagcctcgaaggtccgaaacgtcccgtcgaacccaaacaccatctttcggaggcgcgcggtcaccgcgacctggctgttgaggacgtacgtgatgtcgttccgggccacgactagctgttgcttgctgtgcacctcacagcgcacgtgccccgcgtcctggtcctgactctgggagtagttggtgatgcgactggcgttggccgtgatccacttttccatggtcagcgtgggttgctgcgtgagccgtcgatactcgtcaaactctttgaccgacacaaacgtaagcacggggagggtaaacacaacaaactccccctcgcgagtcacctttaggtaggcgtggagcttggccatgtacgcgctgacctccttgtgggacgagaacagccgcgtccaccccggaaggttggccgggttggtgatgtaactttccgggacgacaaagcggtccacaaactgcatgtgctcctcggtgatgggaaggccgtactccagcaccttcatgaggttcccgaactcgtgctccacacatcgcttgttgttaatgaaaatggcccagctgtgcgagaggcgcgtgtactcgcgtagggtgcggttgcagatgaggtacgtgagcacgttttcgctctgccggacggagcatcgcagtttttggtgttcgaaggtggactccagcgaggccgtctgggtcggcgaccccacgcacaccagcaccggccgcaggcggcccgcgtactggggggtgtggtacagggcgttaatcatccaccagcaatacaccacggtcgtgagtaggtgccgccccaggagcccggcctcgtcgatgacgataatgttgctgcgggtgaaagccggcagcgccccgtgtgtgaccgaggccaggcgcgtgagggcaccctggcccagccccaaagtctgctctagggcggtgagggcgtggaactcgtttcgcgcgtcttcgcccccgtgcgccgccagggcccgcttggtgatgtcgaggatcacctcccagtagtacgtcaggtctcgccgctgcaggtcttccagcgaggcggggctgctggccagggtgtacgggtgctgccccagctgggcctggacgtgattcccgcgaaacccgaactcgtgaaagatggtgttgatgggtcgactcagaaacgcccccgagagcttaacgtacatgttctgcgccgcgattcgcgtggcgcccgtgaccacgcagtccaggacctcgttgagggtctgcacgcacgtactctttccggatccggcgttgccggtgatgagatacgccgcgaacggaaactcccggagcggcaggccggtcgggacctccaaggccgccacgtcccggaaccactgcaggcgcggcacctgcgtgacgtcgagctgctgctgcgagagctctcggatgcgtgcgatgattggttggaccccgtgcatggacgtaaaatttaaaaacgcctcgtccctgaaccgcacggcgggtctggccccgggctgctgtgggggcggacctggtgcccggacgtcccgcgagccctccccgccggacgccgccatggccgcacagcgcgcgcgggcgccggcgatgcggacgcggggcggcgacgcggcgctatgcgcccccgaggacggctgggtgaaggttcaccccacccccgggacgatgttgttccgcgagattctcctcgggcagatggggtacaccgagggtcagggggtgtacaacgtcgtccggtccagcgaggccgccacccgacagctgcaggcggcgatcttccacgcgctcctcaacgccacgacgtaccgggacctggaggaggactggcgccgccacgtggtggcccgcggcctccagccgcagcggctggttcgcaggtaccggaacgcccgggagggcgatatcgccggggtggccgagcgggtgttcgacacgtggcgatgcacgctcaggacgacgctgctggactttgcccacggggtggtagactgctttgcgccgggcggcccaagcggaccgaccagcttccccaaatatatcgactggctgacgtgtctggggctggttcccatattgcgcaagacgcgcgagggggaggcgacgcagcgcctgggggcgtttctcaggcagcacacgctgccccggcagctggccacggtcgccggggccgcggagcgcgccggcccggggcttctggagctggccgtcgcgttcgactccacgcgcatggcggaatacgaccgcgtgcacatctactacaaccatcgccggggggagtggctggtgcgcgacccggtcagcgggcagcgcggcgagtgcctggtgttgtgcccccccctgtggaccggcgaccgcctggtcttcgattcgcccgttcagcggctgtgccccgagatcgtcgcgtgccacgccctccgggaacacgcgcacatctgccgtctgcgcaacaccgcgtccgtcaaggtgctgttggggcgcaagagcgacagcgagcgcggggtggctggcgccgcgcgggtcgtcaataaggcgctgggggaggatgacgagacgaaggccggctcggccgcctcgcgtctcgtgcggctcatcatcaacatgaagggcatgcgccacgtgggcgacatcaacgacacggtacgcgcctacttggacgaggcgggggggcacctgatcgacacccccgccgtcgaccacaccctccctgggttcggcaagggcggcaccggccgcgggtcggcgccccaggacccgggggcgcgaccgcagcagcttcgccaggcgtttcagacggccgtggtcaacaacatcaacggcatgctggagggctatatcaataatctctttggaaccatagaacgcctgcgagagacgaacgcgggtctggcgacccagctgcaggcgcgcgaccgcgagctgcggcgcgcccaggcgggggcgctggagcgggagcagcgcgcggcggaccgggcggccgggggaggcgcgggccgcccggcggaggcggatcttctccgggccgactacgacattatcgacgtcagcaagtccatggacgacgacacgtacgtggccaacagtttccagcaccagtacatccccgcgtacggccaggacctcgagcgcctgtcgcgcctctgggagcacgagctggtgcgctgcttcaagattctgcgccaccgcaacaaccagggccaggaaacgtcgatctcgtactctagcggggcgatcgcctccttcgtggccccgtatttcgagtacgtgcttcgcgccccccgagcgggcgcgctcatcaccggctccgatgtcatcctaggggaggaggagttatgggaggcggtctttaagaaaacccgcctgcagacgtacctgacagacgtcgcggccctgttcgtggcggacgtacagcacgcggctctgccccggcccccctccccaacccccgccgatttccgggcgagcgcgtccccgcggggcgggtcccggtcccggacccggacccgatcccggtcgcccgggagaacgccgaggggtgcgccggaccagggctggggcgtcgaacgcagggatggccgaccccacgcccgccgatgagggaacggccgccgccatcctcaaacaggccatcgccggggaccgcagtctggtcgaggtggcggaggggatcagcaaccaggcgctgctgcgcatggcctgcgaggtgcgccaggtcagcgatcgccagccgcggtttaccgcgaccagcgtcctgcgcgttgacgtcacccccagggggcggttgcggttcgttctggacgggagttccgacgacgcgtacgtggcgtcggaggattactttaagcgctgcggggaccagccgacgtatcgcggttttgcggtcgtcgtcctcacggccaacgaggaccacgtgcacagcctggccgtgccccccctcgttctgctgcaccggctctccttgtttcgccccacggacctccgggacttcgagctcgtctgcctgctgatgtacctggagaactgtccccggagccacgccacgccctcgctgttcgtcaaggtgtcggcgtggttgggggtcgtggcccgccacgcgtctcccttcgagcgcgtccgctgccttctcctccgcagctgccactggatcctgaacacgctaatgtgcatggcgggcgtgaagcccttcgacgacgagctagtcctgccccactggtacatggcccactacctgctggccaacaatccgccccccgtcctctcggccctgttttgcgccaccccgcagagctctgcgttgcagttgcccgggcccgtcccccgcacggactgtgtggcctataacccggccggcgtcatgggaagctgctggaaatccaaggacctgcgttcggctctggtgtattggtggctttcggggagccccaaacgacggacctcgtcgcttttctatcggttttgctaactccggaaaataaacgtgttttttatggaacgttccctacctgtcgtgtcatctctcggggggtggtggtgggcctgtgtgtgtgtcttgtgcaccgaaggaggaaagtgggggggggtggtggtgctggtggtggaaagacatgatagagggaacaaagaaatagaagaaaaccacaaccggcgcgtgccagtaaatacggacgcgcgcacacgcgggggggggtaagttggagcacggggccccggtttattgaccaaattcagggaaacagaaaccgcatcttttcctcgaaagggtacacaaagctcccgccctcgccccacatgccttccagaacccccgtaaacaccagttgaatctcgcgcaggatctcgcgcaggtgatgggcgcagtccacgggggggagcaccaagggccgcgggtacagatccacggggacgccgaccgactccccgcccccgggacatacgcgcacgacgcgtctccagtattgctccgcgtccagcagggcgcctccgcggaaggccgtttggggcagggggtcgtcggcctcgcccgggggggtcagaacgctccagtactccgcgtccagacgcctcccgaaggcatccaggacaaagcggtcacaggcgtcctccatgacgccccgggccgcgcacacggcctcctccggcgggccggcggccggccgccggaggattcgtctcagcgcgtcgcgcataacctcggccgccgcggcgtacgcgggcccgcggagaggaaatccctgcaggaagtcggtgtcatcgcgggagttccagaaccacgccccggtctggctccaggtgacgacgtgggtgtagacgccctctagcgccagggagggggcgaggcgcgggcgtatgccgttggccgaaagtacggcgcgcacggacgcctcgagggcccggcgggcgtcctggatcgcgccgtgcgcggcgtccgcgtccccggggtccacgttgaacagcccccagaacgcagccccggtgccgccgcagaccgcaaacttcaccgagctggccgtctgctcgatctgcaggcagacggcggccatgaccccgccgagcagctgccggagcgcggggcaggcgtcgcacgcgtccggcaccaggcgctccagcacggcccgggcccagggctccgagggggcggccgccaccagcgcgtccagcctttccaggcccgcccgcccccgggcttccggcagcccggcctccccgaggcccgcgagggcggccaggagctgggcctggagcccggagaaacaaaaccgcgccgtccagaccggcccgacggccgccggggggtcgagtagttggatggtggtggccgtggggtgccaccgcgccaccgcttcccgaaaggcgggcaggaggcggccggccgcctccgaggccacggccggccatgcccgcgggggcaggacgaccctggcgcccaccgcgggccaggcccccaggcacgcggcatgggtggccgcggcgccccgcaccaggtcacgcgccgactcggcggcggcggcggccggcacggtaaacgtgggccagcccggaaatcccagcacggcaaagtattggacgggccctccccggacctcaaacccgggccccagaaaagcgaagacgggggccagggctccgggggcggcgtggaccgtggtatgccactgccggaagagggcgaccagcgccggggcggagaacccgtcgccggcgctcacgaagtagtcgtagccgcgcggcagcagcacccgcgccgtgacccgctgcgggtgtccgcggggccgcaggccgacctcgcacacctcgaccaggtccgcgaaggcgccctccttgctggtcggcggaaacgccagggtggtgtattcgcgcgcgaaacgcgcggtcctcgtcgtgatggtgacggcgagcgaggcggaggacgcgcactgggggctgtcgcgaatggcggccaggcgcgcccacgccaaccgcgcgccggggtgctcggcgacgcgcgcggccagggccagcgggtcgacgtcgaccttggcctccacgtccaggagggcggcgcgaggagcggccggcgggccccacgacgccctttcgaccctcacgaccagacccgtctgcgggtcccagcccaggcgcagcgggacgaagagggccaccggccccgtctggcgctccagggccgccagaacgcacgcatacagcgcccgccacagggtcgggtcccccaggggctccagcggggaggcggccggggccgtcgcggcgcgggcggccgcgacggccccggcggccgagacgtcgggggagccgtagaagtcctgcaggtcggacgaaccaacggacacctccgcgaagcgcgcgcgcgcctcccccgcggcgtcgcgacagaccagatacagcagggcgtggaggcagtcgcgcgtgcgcgggggcagccataccgcgtatagggtaatggcgctgacgctctcctccacccaaacgatgccgggggcttccatgccacgacgcccgggggttgccgtgtatcgaacgagcgcggccccagacttatagggtgctaaagttcaccgccccctgcatcatgggccaggcctcggtgggaagctccgacagagccgcctcgagaatgatgtcagtgttgggctgggcgccggaggcgtgcgtgcgcaagcagcgcccccacgcgggcgcgcgcagcttgaagcgcgcgcccgcaaactcccgcttatgggccatcagcagcgcgtacagctgtctgtgcgtccggcaggcgctgtggtcgatgcggtgggcgtccagcagctccacgatggctcgcttggtgaggtttttaacgcgccccgccccgggaaacgtctgcgtgctcttggccagctgcaccccgaacagttcgccccagatgatcttgaacagcgacagcgcgtgctccgtctcgctcacggacccgcgcggggggcagccgctcagggcgtcggccacgcgcttaaccgcgtcctccgacagcaaggggccgtcggtcacgttacagtggcccagttcgaacaccagctgcatgtagcggtcgtagtgggggttcagcagctccagcacgtcctcggggctaaaggttcgccccgaccccccggccatcgagtcccactgcaggcacgcggccatggtgctgcacagacggaacagctcccagacgggggcgacgtttagggtggggtgtagggccacaagctccagctctccggcggcgttgatcgtggggatgacgcccgtggcgtagtggtcgtaaagccgccggaagatggcgctgctatgggcggccatggggacgcgaagacaggcctccagcagcaccaggtagatgaaccgcgtgcggccgaccaggctgttgaggccgcgcatgagcgcgaccacctcggccggcgcgacgtccggccggaggtacttttcgacgaaaaggcccacctcctccgtctcggcggcctgggccgacagggacgtgtcggggtcctggcagcgcagctcccgcagatcccgctgggccctcagggcatcaaaatgtatcccccgcaaaaacagacaaaagttccttggggtcagcgcggcgtcgtggccccagaaccgcacgtgcatgcagttgagggtcagaagcatgtggaggatgttaagactgtccgcgaggcacgccagcgtgcacctctcgaagtagtgcttgtaccggaatttgctgtagatgcgcgacccccgcgcctgcgccgcgtcggcgtgcgacgcgtcgcagcgccctttgaaccggcggcacaacaggttcgtcacctgggaaaactgtgccggccactgcccgctggcgctcaccacgtggttgagcagcatgggcgtaaagacgggctccgagcgcgccccggacccgtccatgtagatcagcagctcccccttgcggagagtccgtacccgccccagcgactggtacacggacaccatgtccggcccgtagttcatgggtttcacgtaggcgaacatgctgtcaaagtgcggcggatcgaagctaaggcccaccgtcacgaccgttgtgtagatgaccacccggtaccggccccatgtggtcacgtcgccgggcggggtgagcgagtggagcagcagcacgcggtccgtaaactgccggcagaacctggcaacgacctccgcgaaggagaccgtcgacgagaagatgcagacgttatctccgccggccaggcgcgcctccagctccccgaagaaggtggcgtccgggggggcgtccggggggggcgccccgcccggcggccccggcgggcgcagggccgcctgcaggacctcgggccccaggcgcgggagaaacagacaacggcgcgccgaaaatccgggcatggcgtactccccgatgaccacgtgaacgttcttttcgccccggaggctgcacagaaagtccaccagctgcgcgttggcggtggcgtccatggcgatgatccgcgggcacgtgcgcagcaggcgcagcatcaacgcgtcgacgcggcccagctgctgcatcgtcggcgagtacagttggcccaacgtcgacatgacttcgtccaggacgagcacgtcgtagttgttcaacaggttcgggcccacgcgatgaagactttccacctgcacgatgagacggtggaaggggcggtcgttcatgatgtaattggtggatgagaagtaggtgacgaagtcgggcaaccctgactcagcgaaccgcgtcgccagggtctgagtaaaactccgacgacaggagacgaccagcacactcgtgtccggagagtggatcgcttcccccaaccagcggatcagcgcggtagtttttcccgagcccattggcgcgcggaccacagttacgcaccgggccgtcggggcgctcgcgtccgggaaggtgacgggtccgtgttgctgccgctcgatcgttgttttcgggtggacccggggaacccactcggccaaatcccccccgtaaagcatccgcgccagcgatacactcgacgtgtactgctcgcactcgtcatccccgatgggacgccgggcccccaggggatcccccgaggccgtgccgggcgccgacgtcgcgcccggggcgcgggcggcgtggtgggtctggtgtgtgcaggtggcgacgttcatcgtctcggccatctgcgtcgtggggctcctggtgctggcctctgtgttccgggacaggtttccctgcctttacgcccccgcgacctcttatgcggaggcgaacgccacggtcgaggtgcgcgggggtgtagccgtccccctccggttggacacgcagagcctgctggccacgtacgcaattacgtctacgctgttgctggcggcggccgtgtacgccgcggtgggcgcggtgacctcgcgctacgagcgcgcgctggatgcggcccgtcgcctggcggcggcccgtatggcgatgccacacgccacgctaatcgccggaaacgtctgcgcgtggctgttgcagatcacagtcctgctgctggcccaccgcatcagccagctggcccaccttatctacgtcctgcactttgcgtgcctggtgtatctcgcggcccatttttgcaccaggggggtcctgagcgggacgtacctgcgtcaggttcacggcctgattgacccggcgccgacgcaccatcgtatcgtcggtccggtgcgggcagtaatgacaaacgccttattactgggcaccctcctgtgcacggccgccgccgcggtctcgttgaacacgatcgccgccctgaacttcaacttttccgccccgagcatgctcatctgcctgacgacgctgttcgccctgcttgtcgtgtcgctgttgttggtggtcgagggggtgctgtgtcactacgtgcgcgtgttggtgggcccccacctcggggccatcgccgccaccggcatcgtcggcctggcctgcgagcactaccacaccggtggctactacgtggtggagcagcagtggccgggggcccagacgggagtccgcgtcgccctggcgctcgtcgccgcctttgccctcgccatggccgtgcttcggtgcacgcgcgcctacctgtatcaccggcgacaccacactaaatttttcgtgcgcatgcgcgacacccggcaccgcgcccattcggcgcttcgacgcgtacgcagctccatgcgcggttctaggcgtggcgggccgcccggagacccgggctacgcggaaaccccctacgcgagcgtgtcccaccacgccgagatcgaccggtatggggattccgacggggacccgatctacgacgaagtggcccccgaccacgaggccgagctctacgcccgagtgcaacgccccgggcctgtgcccgacgccgagcccatttacgacaccgtggaggggtatgcgccaaggtccgcgggggagccggtgtacagcaccgttcggcgatggtagccgtttcgttcgttttaataaaccgacgttgtgcgtttcaccatacttcggcgcgcgcgtgtgtgtttttttttgtggtgtttattttcccccccaccccttccttttctttcggccaccacccccctcctcccccgtactatacaacaaaaaataccacacatacgaccaaatacggacaatcatttctgtctttattcgctgtcagagagtgggggcgtgagcgtggcaggagggcgggccacgtcggggtcccgccgtctggtgtgacgcgatggggggtccgatgcgcgccggtactggggccccggcgcccgggtgaccacgcgcatgtcggggggcacgtagaagttaccctcttcttcggactcgatgtccacgacgtcaaattcgtgggcggtcagcgagacgacctccccgccgtcggtgatgatgacgttgtgtcggcagcagcagggccgcgccccggagaacgcgaggcccataacttggcgagcgtatcgtcgaaggccaggcggctgtttcgccggatgtcccggtagatccccggctcgacgcggacgggggtgatgatcagggcgatcggaacggcctggtccgggaggatcgatgccttggcgggtccgggggccccgccacgcccggcgggcgctccgcggccgtcctccaggcggaacgtcacgccctcctccgcgcccgcgcggtgcctgccgaggaacgtcaccaggtgcggttgcggggggcagtcgggaaagtggctgtcgaggacgtatccctgcaccaagatctgtttgaagttcgggtggcgggggttggcgaagatgggctcgcggcgaaccagctccccggagctccaggccacgggagagatggtgcgacgctcgaggtcggggacgccaaacagaagcacctccgagacaacgccgctatttaactccaccagcgcccgatccggggcggagcatcgccttttttcgccggcggcgcgggaatcgagccagtcccggtcttgggtgacgagcgcctcctccgggcccgggacgcgcccgggcgcgaagtagcgcacgccggggttggggatggaccggatgaacgcccggaacgcctccggcgatcgccgcgccatcaggtcctcgtacgcggaggccgcgggggcgccggggtccgcggggtcgaacgcgtacttggctcggcacttaacctcgtagaaggccaggggggtctggggggcgggggccaggtagccgtgagggtccctggggcacacgaggatgtccagggacgcccccaccatgcccgtgtggccgtccatgaggaccccgcacgcgtgcacgttctcctcggcgaggtccccgggttggtgaaagacgaagcgcccggcgtcggcgtcgtcgttgacgcccgcgtccgcgcggcccacgcagtagcgaaacagcaggtttcgggccgtcggctcgttcacccgcccgaacatcaccgccgacgactgggcggccagccgcaggctggcgttgtgggtgagccactgggacgagaagcacggaccctgcgcgccccaccgcagcgtggaggcggtcgtcaggccccgccgaagcagggcccagagctggcagtcggcctggttttgtgtcgccgcctcgtaaaatcccataagcgggcggggggcgacggcttcggcggcggacgggggggcgcggcgcgtcaggcgccagaggtgccggccgagcccgcggtccaccatgccggccgcctccagcgacacgacgagggagcacagatagtccaggcgagcccacaggggcccgatggccagaggggagcggacgccgcgcagcaggccgcgcaggtggcgctcgaacgtttccgccaagatatgggggggcagtgcgttggggatcgccgacgccgaccacatcgggtcggggtccgggggaccggggctgcagtccgggtcgatggcgtgcgcgccccccggcgagaggggaatgtcgggggttggcgggccggatgaggcctcagagagggccggggacgcgggccgggccttttcgcccggggccccgccgtcgggttgcccacgtggggggctctggggccaatgggaacccggggcccccggtgacgtggggcggggtggggcggggcggggcccaaagacggtcgccagatctaggctgttgggtcggggccgcttcgggggactatcggggtcgcgggcggggtccgcggggcgcttggcgccgggtgttgcggcggccgccatttttacgagcagccggagagctcgagggcggaagggatcctcacgacagagagtggcgcgcggccgggttggcgtgacagaggcgggagaccagcaccagcagcggcctcagctcgggcggcagcgacaccgacgacaggacggccttgtgcgtgcgctggtaatttatacactgctccgtgaacgcgcgccgaatcttgggattgcgaaggtggcgccggatgccctccggcacgtcatacgccaggccgtgggtgttggtctcggccgagttgacaaagagggcggggtgcagaacgcagcgataggcgaggagggccacggcaaagtccggcgagagctggttgttaaagtactggtagcccgggacgcgggtcacggggacgcccaggctcggggccacgtacacgctaaccagcagctccagcagcgtctgccccagggcgtagagatcgaccgccagcccgacgtcgtgcttcagggggcggttgttaaactcggcccgctcgttgttgaggtactttaccaagagctccggtggctggttgtacccgtgccccaccagagtgtgaaagttggccgtggtcagggcggcgggcatcccaaacccccggggggactcgaggtccggctcctggaggcaaaactggccccgggatatcgtggagttggagttcagggtcaccaggctaaagtcggccaggacggcccgccggagcgacaccgcgtccgatcgcagcatcacgaggacgttggcgcacttgatgtccaggtggctgatcccgcacctggtgttcaggaacaccacggcgcgcgccaggtctgtgaagcagtggtggagggccgtcgcgacggagggggtggtcgcgcgcagggacgccagctggccgatgtacttgccgaggtccatgtcgtacgcggggaacacgatctggcgctgctgcagcgagaacccgagcggggtgataaagccgcggatgtcgtgggtgcggccgccgcgaagagcgcactcccccacgagcagggtcgcgacgagctccacggcaaaccactctttttcccggatggtcttcacggcgagcttgtgttcgcgaatcaactgcacctcgccgtacccccccgagcccccgaagctgcgggccccggggatctccagggtcgtgtagcggagggcggggttgacggcgaatacggggatgcatagcttgtggatgcgcgcgagggacaggatgtgcgaggggggcgacgggggcgaggtcatggccgtctcggacctgcgcaggggcgggcgcctcagcttggccgcagggccgggggcctcgggggacgagcggcgacgagacgagcggctcactcgccatcgggacagtcccgcgcgaagccgctcccggaagctggatcggcggcgggacccggggcgggctccggagacggcgccgtctcggggggaggggccgcttgggcgtccggacgcccggcggctgagggagtgtatgtaggacgcgagccaggccttgaaggagcgtcggtgtgcaccttgggggctgatgtcagctgccacatgactagcaggtcgctgtcgcccggactcatccatccgtccgccaggtcgccgtccccccacagagacgcgttcgccgcggcctcttcgagctgctcctcctggtccgcaagacgatcgtccgccgcgtccaggcgctcgctaagcgcgggatcgaggtaccgtcggtgtgcggttagaaaatcacgtcgcgccgcttgctcttccacgcgaattttaacacaggtcgctcgctgtcgcatcatctctaagcgcgcgcgggactttagccgcgcctccaattccaagtgggccgccttggcggccataaaggcgccaacaaacctaggatcttgtgtactcacgccctcccggtgtagctgcagggtctggtccctgtacacctcggcccggaggtgcgtctcggccaaacgtcggcgcagggccgcgtggctggcgtctcggctcatctcgccgcccccgcgcgcgcccgacgtcggactccttcgccccgacccccctgacctcagccgcccccgcctcgcccgcgatgtttggccagcagctggcgtccgacgtgcagcagtacctggagcgcctggagaaacagaggcaacagaaggtgggcgtcgacgaggcgtcggcgggcctgacgctcggcggcgatgcgctgcgcgtcccttttttggattttgccaccgcgacgcccaagcgccaccagaccgtggtcccgggcgtcgggacgctccacgactgctgcgagcactcgccgctcttctcggccgtcgcgcggcggttgctgtttaatagcctggtgccggcgcaactcagggggcgtgactttgggggcgaccacacggccaagctggagttcctggcccccgagctggtgcgggcggtggcgcgcctgcggtttcgggagtgcgcgccggaggacgccgtgccccaacgcaacgcctactacagcgtcctgaacacgtttcaggccctgcaccgctccgaagcctttcggcagttggttcacttcgtgcgggacttcgcccagttgttgaaaacctcgttccgggcctctagtctcgcggagactacgggccccccgaagaaacgggccaaggtggacgtggccacccacgggcagacgtacggcaccttggagctcttccagaaaatgatactaatgcacgcgacctactttctggccgccgtgctgctcggggaccacgcggagcaggtcaacacgttcctgcggctcgtgttcgagatccccctgtttagcgacacggccgtgcggcacttccgccagcgcgccaccgtgtttctagtccccaggcgccacggaaagacctggtttttggtgcccctcatcgcgctgtcgctcgcgtccttccgggggatcaagataggctacacggcccacatccgcaaggcgaccgagcccgtgtttgatgagatcgacgcctgcctgcggggctggtttggctcgtcccgggtggaccacgtcaagggggaaaccatctcgttctcgttcccggacggctcgcgcagcacgatcgtgtttgcctccagccacaacacgaacgtaagtacgccttcctcccgcggtgcctgtttccccggtgccgccctccccgagatcgaccgacagacaaacacagccagacgcgagtgtgggacgacacgcccgcagcccccccccgccatggcggggggaagccttactgtttatttgtaatctgacgatgaggctctggccacggcccgcgcgaccgcggggcagctcgttgcaaacaggcggctggtatacgatgacagaacgcagaggcgccacccggcgctggtcgggcggatgacgctttccgcgccgtcccggcccacgacgacctcgtgcaggtgggccgtgatgcgcgggcggcgggtcgcctgccgcaggataaccgcgtccacggggtgcccaaagaggagctgacacaggctcgcgtccccccggacggccagggtgcgctgggccatattggaccacatgcacggggcgacgcagggacaggcctccgccacggcgggggcgcgccacagcgcgttggcggaatcgatgtgggccgtcggggcgcaggcgccgcctcctcccggggggtcggtaatcctggatagcagccatcctaaatggcgggcccggctgcccgggggacagagcgaccccaggtcatcatccatggcccagcagtatatgcggccgccggggaggtgccaccaggcccccggacccagggcacagcacgcccccggattcgggggcggttccgtgggtaccaggtaggcgccgtcgagctcgtgggccacgggctcgtccgcgagctgttcggcggcggggtcgggggtttcctccgggggggaggcagcttccaggtggccgaaggctagggtgcacagcagcggggtccgggggtgcgttacgctgcggaggtggacggtggcgcagtagcggcgctcgcggttaaagaagaaaatggcaaagaacgtgttcgaaggcaggcgcagcgccttgggccgcgtcaggtacaggaagatctcgcagaaaagggcacgctcggggtcggggtccggaagggccacctggcacagcggctcggtgaggaccgtgaggcaccgaaaaatcttaagccgctcgtccccccgaacgacgcgccacacgaagacagagttggcgatgcgcgcgacgaggtcggcttcgggccccgggtcgggggcgcgcgcgtcggggggggcgccccggtgacccggcggggccgcggctcccggggggcctggcgtcgcctggggacgccagagtgcccgctgtgccaggttggtggtggggaagggaccggagacgcaccaaaagcagaggggccagcgcgtgtatgagttggggggggggtgggtgagcggtggaacaaaagcacgcgtcagcggacaaggccgggtcccgtagccgccccgcgacagaaccggagtccgacggcacgcgcgacggggtctgcgaggctgaggtacgccgcggtgttaatggtaaacgcaaagcctcccggaaagaccactagcccgcagaggcggcgattgaacccaaggcagaggtacgcgtagctctctcccggaaggtattgctcgcagaccctgtgtggggcagtggaggggctgccctccatgaagcgacatttactctgctcgcgtccattgacgtcaccgtcaatcaccactgcgattggacggttggtgaggcgcagcgtgtctccgctggtgctgtagtagtcaaacgcgtagtgggcgtcggagtcggcgaagcgggcggggatgtcgtcgctgagagggacgagccgccgccgccgcccccgaccgccctggccgcccagatgcgccagcacggccagggcgtacgcggtgtgaaagaacgcgtcgggggcggtcccctcgagggcgcgcatcaggttctccaggagcacggggaagcgccgcgtcacctcccctagccactcgctctgatgggggccaaagtcgtagcgcaggcgctggaagatgcgcgggccgccttggagcgcggcccggatagagtggcccagggcccgcagacacgcgatctggatgcgcgcgacgaaggccacctcggccgcgatgtcaaagggctgcagcacggggcgcgggtggcgcaggggtccctcgagcgcgggaaagcgacgcagcagcgccgtctgggccgcgggggacagctggtgggggcgcacgacgcgctcggcggcacaggcctccgtcagggccgtggccagctcggaggacagccgcggggggcgggcgcgtcgcccgccccacgccaccgaattctcgtaggagacgacgacgaagcgctgcttggtcccgtagtgatggcgcaggaccacggagatggagcgacggctccacagccagtcgggccggtcgccgccggccagagcttcccacccgcggtccagccactcgaccagcgatcgcggcttggcggtccccggcacgagggtgagcacgtcgttgaggacgtcctcgcccgcggcccgggggccccccggggtggcaaagcgccccccgccgggcggctccaggcccgccagcaccgcctccgcgtccgacgcgcccagggatcccccgctgacggcctggtggaccagggcgccctggcggagccccgaggcgacgccggaggccgcgtgcttggggcgcgcgcggaccgggtggcggcgggtgacgtcctgcacggcccgctggaccagcgcgaggatctcctcgttctcttgcgtgatggacacgtcctccgcggtggccgtgtcgcctcccggggccgtcagctgctcctccggggagatgggggggtctggggtgccgacaacggccggcccggccccgcccgagaccgaggacgcctggggagtgggggtgccgctttcccccatccccagggacaggtgggccgccgcctccgtcgcggcggcgggagccgcggcccccagccgcgcgacgtagcgacaaaagtggcgacagaggcgcatgaggcgcgcgccgtcggccgcgtatcgcgtgtttggcgggacgagctcgtcgtaactgaacaggagcacgcgggcgcaggtcgcccacgggccccacgccaggcgcagcgccgcgaccgtgtacgggtcgtacacgccttgggcgtcgcacgcgaccggcagggagacgaacagcccgcccgcgctggggacgcgcggcaggaggtccgggtgcgccgggatgacgggggctaggatcgcccccaccgcatccgccggcacgtaggcggcaaacgccgaacgccacggggtgcagtcgccggtcgcgtgggcccgggtctgggtttcgacccggaagttcgcggccgccccgccgtcggggcggccgcgcacgagggcggacagcgggacccccgccgccgccaggcactcgctggagatgatgacgtgaatcagcgaggcggggctgctcgggtcccgggtgagatcgtattggacctcgttggcaaagtgcgcgttcatggcccggccggcggtgcgagcccttcccggtgccggaaggggcgtgggtggggggtgcgtgtgcgcgtcctcggggcccgcgggcgcacgtgcgcttatacgctgtgtgtttcgtctgtccccagggaatccggggccaggactttaacctgcttttcgtcgacgaggccaactttattcgcccggatgcggtccagacgattatgggctttctcaatcaggccaactgcaagatcatcttcgtctcgtcgaccaacaccgggaaggccagcacgagctttttgtacaacctccgcggggccgccgacgagctgctcaacgtggtcacctatatatgcgacgaccacatgccgcgggtggtgacgcacaccaacgccacggcctgttcctgctatatcctgaacaaacccgtgtttatcacgatggacggcgccgttcgccggacggccgatctgtttctgcccgactccttcatgcaggagatcatcggggggcaggcccgcgagaccggcgacgaccggcccgtcctaacaaagtcggcgggggagcggtttctgctgtaccgcccctccaccaccaccaacagcggcctgatggcccccgagctgtacgtgtacgtggacccggcgttcacggccaacacgcgcgcctccggcaccggcatcgcggtcgtcgggaggtaccgcgacgatttcattatcttcgccctggagcactttttcctccgcgcgctcacgggatcggcccccgcggacatcgcccgctgcgtcgtgcacagcctcgcccaggtgctggcgctgcaccccggggcgtttcgcagcgttcgcgtggcggtcgagggcaacagcagccaggactcggccgtggccatcgccacacacgtgcataccgagatgcaccgcatcctggcctcggcgggggccaacggcccggggcccgagctcctcttctatcactgcgagccgcccggcggcgcggtattgtaccccttctttctgctcaacaaacagaagacgcccgccttcgaatactttatcaaaaagttcaactccgggggcgtcatggcgtcccaggagctcgtctccgtgacggtgcgcctgcagaccgacccggtcgagtatctgtccgagcagctcaacaacctcatcgaaaccgtctctcccaacaccgacgtccgcatgtactccggaaaacgcaacggtgccgcggacgacctcatggtcgcggtcatcatggccatttacctggcggccccgaccgggatccccccggccttttttccgatcacgcgcacgtcttgagtctttcttgccgtttcttttgtttctctttctttccccccccccctctctccgcaataaacgccttcccggaactgtgttttccccccctacaacagtgttgtccgttggttgggtggttggggtgcgggggtgggcgggggaagcaagaaaacggtcggcgaacacaacatcgggaaaacggattcccgcacgtgcgtcttcccagattcgacacacacaccccccttctccttaaataaacacaaaccacacgctcgttggttggttaatgccagcgctttatttacgtcttgtttttttttttgcgtttcctccgcgggtcccttcccaacacgcctgcccccgcctcaggggtagcggataaccggggccatgtcgccggattgcacaacggcggcgccgtcgaacgtacacacccgaaccgccggggccagggccaggatgtccccgagttggcccgcgtgcgccagccaggcgaccagcgcctcgtaaagcggcagcctgcgctcgccgtcctgcatcagcatgggggcttcggggtggatgagctgggcggcttctcgcgtgacgctctgcatctgcaggagcgcgttcacgtatccgtcctgggcgctcagcgcgagcagccgggggatgagcgtgaggatgagggtggttccttcggttatggagtagaccatgttgaggacgagcgaccgcagctcggtgtttacggaggcgagttgctggacgtcggccacgagcgagagacgggccccgttgtaatacagcacgttgaggtcggggagctccccgggcgtccgggggtcggggttgaggtcccggatgccccgggcgaccagccgcgcgactatctcgcgggccaggggcgttgggagcgggaccggaaaccgcagcgtgaggtccagcgactccaggcgcacgtccgtcgcctggccctcgaagacgggcgggacgaggctgacgggatccccgttgcagaggtcgacgggggaggtgttgcggagattgacggtgccggcgtgcgtgagccccaggtccacggggcaggcgacgattcgcgtgggcagcacccgcgtgattaccgcggggaagcgcctgcggtacgccagcaacaaccccaacgtgtcgggactaactcctccggagacgaacgattcgtgcgccacgtccgcgagcgccagctggcggcggatggtcggcagaaagaccactcgaccctcgcaccgctgcagcgccgcggcatcggggcgcgagatacccgaggggatcgcgatgtctgcttcgaaacaatccgtgatcatggcgccgggccgcgagacaccggaacgcgggggtgcgggagggccggaaagcgcaacgcaaccgggacgatgatgaaacagagatggggggcaccgaccgtgtgggagagggggcggggcagggctcagcagcacgcacggggaggtctgtcgtgcgcaggagccccaggtgagaatcagtcccccggagctcgggtctgggttttattgggacctgccctcggaatcgcggctcccagtccaagcccccctgggggggcggggacagggggtgtgtgtgggtaaaagcaacgtcggaaaatcaaacccaatgccccaaacaggaaaaaagagacgggcgggtggagggaaagctggggaagaagaagccaattttacagagacaggccctttagcggggaggcgtcgtagatgagatactgcgtaaagtgggtctctcgcgcgtgggcctccccatcgcgggcgctgcgtagcagggcggggtcgctggcgcaggtgatcgggtaggcttcctgaaacaggccgcacgggtcttccacgagctcgcggcaccccggcgggcgcttaaactgcacgtcgctggcagcggtggccgtggataccgccgatcccgtttccacgataagacgctccaggcagcgatgtttggccgtgatgtcggccgcggtgaagaacttgaagcaggggctgaggacgggcgaggccccgttgaggtgataggccccgttgtacagcaggtccccgtacgagaaccgctgcgacgcccacgggttggccgtggccgcgaagggccgcgccgggtcgctctggccgtggtcgtacatgagggctatgacgtccccctccttgtcccccgcgtacacgccgccggccgcgcgtccccgcgggttgcagggccggcgaaagtagttgatgtccgtggccacgggggtggcgatgaactcacacacggcatcctgcccgtggtccatgccggcgcgccgcggcacctgggcgcagccaaagaccgggaggggctgggccggccccagccggtttcccgccacgaccgcgttgcgcaggtacacggcggccgcgttgtctagcagcgggggggccccgcggccgaggtaaaagttttgggggaggttgcccatgtccgtaacggggttgcggacggtggccgtggccgcgacggcggtgtagcccacacccaggtccacgtttccgcgcggctgggtgagcgtgaagttgacccccccgcccgtttcgtggcgggccacctggagctggcccagaaagtacgcctccgacgcgcgctcggaaaacagcacgttctcggtcacgaagcggtcctgccgcacgacggtgaacccgaacccggggtggaggcccgtcttgagctggtgatacagggccacggggctcatcttgaagtaccccgccatgagcgcgtaggtcagcgcgttctcccccgccgcgctctcgcgggcgtgctgcaccacgggctggcggatggaggagaagtagttggcccccagggccggggggaccagggggacgtggcgcgccaggtcgcgcagggccggggggaagttgggcgcgttggccacgtggtcggcgcccgcaaacagcgcgtggacgggcaggacgtagaagtattcgccattttggatggtgtggtccaggtgctggggggccatgagcagcacgccggcgtgcagcgccccgtcgaagatgcgcatgttggccgtcgacgcggtgttggcgcccgcgtcgggcgccgcggagcacagcagcgccgtcgtgcgctcggccatgttgtgcgccagcacctgcagcgtgagcatggcgggcccgtcgacgacgacgcgcccgttgtggaacatggcgttgaccgtgttggccaccagattggcgggatgcagcgggtgggcggggtcggtcacgggatcgctcgggcactcctcgccgggggcgatctccgggaccaccatgttctgcagcgtggcgtacacgcggtcgaagcggacccccgcggtgcagcagcgcccccgcgagaaggccggcaccagcacgtaatagtagattttgtggtggacggtccagtcggccggccggtgcggccggtcgtcggcggcgtcggccgcgcgggcctgggtgttgtgcagcagccggccgtcgttgcggttaaagtcggccgtcgccacgttgcacgccgccgcgtagacgggctcgtgcccccccgcgtcaatccggcagtctcggtggcggtccagggccgcgtgtcgcataaggccgtcgcagtcccacacgaggggcggcagcagcgccgggtcgcgcatcaggtgattcagctcggcctgagcctgcccgcccagctccgggcccggcagggtaaagtcgtccaccagctgggccagggcctcgacgtgggccaccaggtcccgatacacggccatgcactcctcggggaggtcgcccccgaggtaggtcatgatgtacgagaccagcgagtagtcgttcacgaacgccgcgcatcgcgtgttgttccagtagctggtgatgcactgagtcacgagccgcgccagggcgcagaacacgtgctcgctgccgtgaatcgcggcttgcagcaggtaaaacaccgccgggtagctgcggtcctcgaacgccccgcggacggcggctatggtagccggcgccatggcgtggcggccaacgccgagctccaggccccgggcgtcacgaaacgccaccggacacagcgccaggggcaggttgccgttgaccacgcgccaggtggcctggatcgcccccggaccggccggggggacttcgccgccgggaagctcgacgtcggccacgcccgcgaagaagtcgaacgcggggtgcagctccagagccaggttggcgttgtcgggctgcatgaactgctccgcggtcatctggcactcggcgacccaccggacccggccgtgggcgaggcgctgccgccaggcgttcagaaaacgctgctgcatgtccgcgccggggccggccggggccgcgacgtacgccccgtacggattcgcggcctcgacggggtcgtggttcacgcccccgacggccgcgtcgatgttcatgagcgaaggatgacacacggtcccgaccgcgttctccatggacatccgcagaacctggtggtcctttccccaaaaaaacagctgccggggagggaacgcgcggggctccgggtggccgggggcgggcaccaggtccccggcgtgcgcggcgaagcgctccatggccgggttgaacagccccaggggcaggacgaacgtcaggtccatggcgcccaccagggggtagggcacgttggtggcggcgtagatgcgcttctccagggcctccaggaagaccagcctgtcgcctatggccaccagatccgcgcgcacgcgcgttgtctggggggcgctttcgagttcatccagcgtctcccggttcgcctcgagttgctcctcctgcatctccagcaggtggcggcccacgtcgtccaggctccgcacggccttgcccatcaccagcgccgtgacgaggttggcctcgttcaagaccatctcgccgtaggtcaccggcacgtcggcctcggtgtcctccaccttcaggaaggactgcaggaggcgctgtttgatggcggcggtggtgaccagcaccccgtcgaccggccgcccgcgcgtgtcggcgtgcgtcaggcggggcacggccacggacggctgcgtcgccgtggtcaggtccacgagccaggcctcgatggcctcgcggcgatggcccgccttgcccaggaagaagctcgtgtcgcaaaagctccgcttcagctcggcgaccagggtcgcccgggcgaccctggtcgccaggcgcccgttgtcgagatatcgttgcatgggcaacagcagggccaggggaggcgccttctccaacagcacgtgcagcatctggtcggccgtgccgcgctcaaacgcccccaggacggcctggacgttgcgcgcgagctgctggatggcgcgcagctggcgatgcaggctaatgcccgtcccgtccagggcctcccccgtgagcagggcaatggcctcggtggccaggctgaaggcggcgttcagggcccggcggtcgatgaccttcgtcatgtaattatgcacgggctgctcgacggggtgcgggccgtcgcgggcgatgaggggctggtggacctcgaactgcacacgcccttcgttcatgtaagccagctccgggaacttggtgcacacgcacgccacggacaggccgagctccagaaagcgcacgagcgacagggtgttgcagtaggaccccagcagggcgtcaaactctacgtcatacaggctgttttcgtcggagcgcacgcgggcgaaaaaatcaaagagtctgcggtgggacgccacctcgatcgtactcaggatggagccggtgggcaccatggccgcggcgtaccggtaacccggggggtcgcgggcaggagcggccattgggttccttgggggattcgcaggctccatcaagccgagctcgggaaggccaagcccctcccgcacaacgcctcaccgccggcggacgcgactaacaacccacgggccgccaaaaaccccaaggggcaacccgaccaacaacaggcgaggggaggaaaggcgtaaagggggcgttgggaggcaaaaagaaagaaaacacccagacgtaggcccgaggaccggccggcgtcctctgtccctgagcacccactgtgcccaacaggcacgggggcgagctgcccctgccttatatacccccccgccacacccccgttagaacgcgacgggtgccttcaagatggccctggtccaaaagcgtgctagaaaaaagttggtaaaggcggcaaagcagtccgccgccgccacccacatggcggcgccggccgcgcaggcgattcccagagaacgggcgcggaggggatccgtgcggggcagcagctggctggcggtgatccaatggaaaagcccgtcgggactgaacgtctcatgggcggccgccaccagggcgcacagggccgcgccgcccatgatcacgcacaacccccaaaacacgggtagcgacaacggcaggcgatcccgtttgatgttcacgtacaggaggagcgcccgtgccagccacgtgacatagtaggcgaggacggcggctataatacatgccggcgccaccgcccgtccggtccacccgtaatacatgcccgcggccaccagctccagcggcttgaggaccaggaacgaccaagcaaacatcaccacccgcttggaaaagaccggctgggtgtggggcggaagacgcgagtaggccgaactgacaaaaaaatcagacgtgccgtacgaggacagcgaaaactgttcatcgagcggcagttcgccgtcctccccgccacacgcggcctcgtctaccagctcgcgatccaacaaaggaacatcatcccgcattgtcatggtcggtgcggggagccggcgaggcagcgaaaccgaaagtagtgctggcggcgcgggcccgggtccggacccaagcttcagggatggggggcggaggccaaaatcaaacaagcaccgcgcgggttctacacacaacccccacccgggtagtatccgcggatgcgagtgcctggcgaagtcacgtcccagcaggatataaacctcggccgttgggcccggaacccccgaaattcacacccacgccctgacgcccaaatcatgggtggatgtggttcgcgagccgcacatccgtgcgtccgccctcccccgcgggctggtgacgtggcggttagtcagtgggaaggcagggggaaagatggggtgggggaggaaacgaagaaaacacccagagggccacgtcgggaatgcgcccggagttgtccttaaaaggccggccgtgcgtgacggaagccgtcgtttgcccaagcaccgacgccgcgatccacagtggggggagttcctccgtccggccacaaccctacgcgcgggcggcacgcgcgagagcaacccacgggtcccgttcgcgccaccgccagcccttgctcccaccaccctcctcccaccaccccactcttcccccccccccaagtccgccccgtggctcgccggccatggagctcagctatgccaccaccctgcaccaccgggacgttgtgttttacgtcacggcagacagaaaccgcgcctactttgtgtgcggggggtccgtttattccgtagggcggcctcgggcttctcagccgggggaaattgccaagtttggcctggtggtccgggggacaggccccaaagaccgcatggtcgccaactacgtacgaagcgagctccgccagcgcggcctgcgggacgtgcggcccgtgggggaggacgaggtgttcctggacagcgtgtgtctgctaaacccgaacgtgagctccgagcgagacgtgattaataccaacgacgttgaagtgctggacgaatgcctggccgaatactgcacctcgctgcgaaccagcccgggggtgctggtgaccggggtgcgcgtgcgcgcgcgagacagggtcatcgagctatttgagcacccggcgatcgtcaacatttcctcgcgcttcgcgtacaccccctccccctacgtattcgccctggcccaggcgcacctcccccggctcccgagctcgctggagcccctggtgagcggcctgtttgacggcattcccgccccgcgccagcccctggacgcccgcgaccggcgcacggatgtcgtgatcacgggcacccgcgcccccagaccgatggccgggaccggggccgggggcgcgggggccaagcggaccaccgtcagcgagttcgtgcaagtgaagcacatcgaccgtgttgtgtccccgagcgtctcttccgcccccccgccgagcgcccccgacgcgagtctgccgcccccggggctccaggaggccgccccgccgggccccccgctcagggagctgtggtgggtgttctacgccggcgaccgggcgctggaggagccccacgccgagtcgggattgacgcgcgaggaggtccgcgccgtgcatgggttccgggagcaggcgtggaagctgtttgggtcggtgggggctccgcgggcgtttctcggggccgcgctggccctgagcccgacccaaaagctcgccgtctactactatctcatccaccgggagcggcgcatgtcccccttccccgcgctcgtgcggctcgtcggtcggtacatccagcgccacggcctgtacgttcccgcgcccgacgaaccgacgttggccgatgccatgaacgggctgttccgcgacgcgctggcggccgggaccgtggccgagcagctcctcatgttcgacctcctcccgcccaaggacgtgccggtggggagcgacgcgcgggccgacagcgccgccctgctgcgctttgtggactcgcaacgcctgaccccgggggggtccgtctcgcccgagcacgtcatgtacctcggcgcgttcctgggcgtgttgtacgccggccacggacgcctggccgcggccacgcataccgcgcgcctgacgggcgtgacgtccctggtcctgaccgtgggggacgtcgaccggatgtccgcgtttgaccgcgggccggcgggggcggctggccgcacgcgaaccgccgggtacctggacgcgctgcttaccgtttgcctggctcgcgcccagcacggccagtctgtgtgagatatcccaataaagtgcagtcgttttctaacccacggatgccgttgtatgcctatacgggggactatgggggggggggggggaaaaggaaaggaaacaggaatggagaagggaaaggaacagaggcggtagcggacgcacggcggacacaataacaaacagaccgcggacacggagggagtcggttgggttgggcgtggacgccgctgcgtccacacacccgtttattcgcgtctccacaaaaatgggacgcacgttcggaccaccctgaggatgcccgccagggccgcggtaatcataacgacccccagcgcggacgcggccagaaacccgggggcgatggtggcgatgggcagcgtgtcaaaggccagcagatgaatcacagttccgttggggaacaacaacagggccacggacggcacgtcgctggaaaacacgttcggggtgcccgccaccggcccctgggccagctgctgttgggtggcatccgtgtccaccagcagcaccgacatgacctccccggccggggtgtagcgcagaaacacggcccccacgaggccgaggtcgcgccggttttcggtgcgcaccagccgcttcggctcaatctcccgcgcgtgcccttcgcaggtggcggtgagataggtgataaacagcgggcggcggacgtcaacgcccgtaagcttgtatccgatcccgcggggcaagggggtgtgggtgacgacgtagctggcgttgtgggtgatgggcacgaggatccggggctccgcgttgtgcgacgggccgctacactggtgggtggcctccgggacgaaggcgcggatcagggcgttgtagtgcgcccagcgcgtgagagcggaggccacgccgcgggtctgttgtgccatgacgtccgccgggatgtcggatcgggtggccatggccagcgcgtccaggatgaacccgccctcggcgagatcgaagcgcagggaagctgcgcatggggaaaagtggtccgggagccagaagaggtttttctggtggtcggtcctggctagcgcggcccggagatcggcgtgggtcgccgcggcgacgtcggacgtacacagggccgtggttatgaggaggccccggcgggcgcgttcccgctgctcggccgagggcgcgcccgccaggaacggcgcccggaggacggccgtggcgtaaaacagcgctcggcggaccatcggggcggttagcgcgcggccgccgagaaactcggcgtacagggcgtcgatcaggcgggccgcgctcggggccaccgcgccataggccgcggggctgtccaacacgaacgccagctgatagcccagcgcgtgcgccgccaggctctgctctcgctcgaggatcgcggccaccagatgcccgaggcgcgcctccagccgcagacgggccgccgggtccaacacggacacgttcaggaacaccgagtcggccgcgcagcccgctgctccccgggcggccaggccggccagcacgcgcgagtgggccaaaaagcccagcaggtcggagaggcgaatcgcgtcgtgggcgtgggccgcgttgacgaacgcaaaccccgacgaggcgagcagccccgcgaggcgccagaacagggacggacgcgcgtccgtgccggagcccgggtcctcccccaaaaactccgcataggcccgcgacatatactgggcgtagttcgtgctctcctcggggtagccggccacccgccggagggcgtccagcgccgagccgttgtcggcgggcgtcggggcccccaggacaaagacgcgatacctggggccggccggaggcccggggagcaccgcgggggcgttttcgtcggtcggatttccgacccgagcgagggtcttgtccgcaggcaccactatgatctcggccggagggctgtcccgcatggatatcacgagccccatgaagcccttcccgtatcgcgcgcgcaccagcgcggcgtcgcacccgaacgccagcccgcccgtcgtccagacgcccacgggccacgtcgaggccgacggggagaggtagacgtaccgacccggagtccgtagcaggcccctggcggccagccaggtcacggacgcgttgtgcagatgcgcgatgctcaggttcgtcgtcggatgcctcggcgcccccgcgggcggccccgggggcggcgcgttgcgtcggccgtccgggtgcctctcggtcgccccgtcgtctccccgcgggaacgtaagcccctcgcggtccggcgcggccgcgaatgttacccaggcccgggaccgcaacagcgcggaggcgccggggttgtgcgacagtcccttgagctgggtcacctcggcggggggacgggacgtgggccccgcctcggggagctcgggcaggctcgcgttccgaggccggccgagcagatagctctttgggatgtaaagcagctgcccggggtcccgaggaaactcggccgtggtgaccaacacgaaacaaaagcgctcggcgtaccaccgaagcatgggcacggatgccgtagtcaggttgagttcgcccgggggcgccaagcgtccgcgctgggggtcgctggcgtcgggggtgttgggcaaccacagacgcccggtgtttgtgtcgcgccagtacgtgcgggccaaccccagaccgtgcaaaaaccacgggtcgatttgctccgtccagtacgtgtcatggcccccggcaacgcccaccaggacccccatcaccacccacagaccggggcccatggtcgtccgtcccggctgccagtccgcagatggggggggggtgtccgtacccacggcccaaagaggctccgcacctcggaggctatcggaggccctttgttgccgtaagcgcgggccaaaggatggggtggggtgagggtaaaagcacaaagggagtaccagaccgaaaacaaggacggatcggcccgctccgtttttcggtggggtgctgatacggtgccagccctggccccgaacccccgcgcttatggacacaccacacgacaacaatgccttttattctgttcttttattgccgtcatcgccgggaggccttccgttcgggcttccgtgtttgaactaaactccccccacctcgcgggcaaacgtgcgcgccaggtcgcgtatctcggcgatggacccggcggttgtgacgcgggttgggatcatcccggcggtgaggcgcaacagggcgtctcgacacccgacgggcgactgatcgtaatccaggacaaatagatgcatcggaaggaggcggtcggccaagacgtccaagacccaggcaaaaatgtggtacaagtccccgttgggggccagcagctcgggaacgcggaacagggcaaacagcgtgtcctcgatgcggggcagagaccccgcgccgtcctcggggtcggggcgcggggtcgccgcggcgacccccgtcagccggccccagtcctcccgccacctcccgccgcgctgcaggtaccgcaccgtgttggcgagtagatcgtagacacggcgaatggcggacagcatggccaggtcaagccgctcgcccgggcgttggcgtctggccaggcggtcggcgtgttcggcctccggaaggacacccaggaccaggttcgtgccgggcgcggtcgggggcatgagggccacgaacgccaacacggcctggggggtcatgcttcccatgaggtaccgcgcggccgggtagcacagcagggaggcgatagggtgccggtcgaaaacaaggatgagggccgggggcggggcttgcgggcccacagcctcccccccgatatgaggagccaaaacggcgtccgtcgccgcataaggcgtgctcattgttatctgggcgctggtcattaccaccgccgcctccccggccgatatctcgccgcggtccagacggtgctgcgtgttgtagatgttcgtcagggtctcggaggcccccagcacctgccagtaagtcatcggctcggggacgtagacgatatcgtcgcgcggccccagggcctccatcagctgcgcggaggtggtggtcttccccaccccgtggggtccgtctatataaacccgcagcagcgtgggcagctccggatccccgcgggcttcggaggccccctggcgatggctaggacgggccgccgtgcggccgtcggtaggcccgctcgcacgagcagcctgaccgaacgcaggcgcgtgctgttggccggcgtgagaagccatacccgcttctacaaggcgtttgcccgagaggtgcgggagttcaacgccaccaggatttgcggaacgctgctgacgctgatgagcgggtcgctgcagggtcgctcgctgttcgaggccacgcgcgtcaccttaatatgcgaagtggacctcgggccgcgccgcccagactgcatctgcgtgtttgaattcgccaatgacaaaacgttgggaggtgtgtgcgtcatcctggagctaaagacatgcaaatcgatttcttccggggacacggccagcaaacgcgaacagcggaccacgggcatgaagcagctgcgccactccctgaagctgctgcagtcgctcgcgcctccgggggacaaggtcgtctacctgtgtcctattttggtgtttgtcgcgcagcgtacgctgcgcgtcagccgcgtgacccggctcgtcccgcaaaagatctccggcaacatcaccgcggccgtgcggatgctccaaagcctgtccacgtatgccgtgccgccggaaccgcagacccggcggtcgcggcgccgggtcgccgcgaccgccagaccgcaaaggcccccctccccgacacgtgacccggaaggcacggcgggtcatccggccccaccagagagcgaccccccctccccaggggtcgtaggcgtcgctgcggagggtgggggtgtgcttcagaaaatcgcggcgcttttttgcgtgccggtggccgccaagagcagaccccggaccaaaaccgagtgaggttctgtgtgttgtttttttttttcctcgttttgttttctcttctttcccccccccccctcccccgcttctggccaagcatcctcacctgcttaagcggaacccgcgggcgcgcggggactcatttgtcgccggcgacacccacccgacaacagcccctgggtgtcgaccgctgtcgcccccgtctgtcgcctctcccttttttccccccctcaaagaacgtggtgttgggcgccggccaattcttcccggagcgccgtcgtcgcccgcccgccgccctcgaacatggacccgtactaccctttcgacgcgctggacgtttgggaacacaggcgcttcatcgtcgccgactccaggagcttcatcacccccgagttcccccgggacttctggatgttgcccgtgttcaacatcccccgggagacggcggcggagcgggcggcagtgctgcaggcccagcgcaccgcggccgcggcggccctggagaacgccgccctccaggccgccgagctgcccgtcgacatcgagcgccggatacgcccgatcgagcagcaggtgcatcacatcgccgacgccctggaggcgctggagaccgcggcggccgcggccgaagaggcggatgccgcgcgggacgccgaggcgaggggggagggcgctgcggacggggcagcgccgtcgcccaccgcgggccccgccgccgcggagatggaggttcagatcgtacgcaacgacccgccgctacgatacgataccaacctccccgtggatctgctacacatggtgtacgcgggccgcggggccgcgggttcgtcgggagtcgtctttggtacctggtaccgcacgatccaggaacgcaccatcgcggacttccccctgaccacccgcagcgccgactttcgagacgggcgcatgtccaagaccttcatgaccgcgctggtcctgtctctgcagtcgtgcggccggctgtacgtgggccagcgccactattccgccttcgagtgcgccgtgctgtgtctgtatctgctgtaccgaaccacccacgagtcctcccccgatcgcgatcgcgctcccgttgcgttcggggacctgctggcccgcctgccgcgctacctggcgcgtctggccgcggtaatcggcgacgagagcggacgcccgcagtaccgctaccgcgacgacaagctgcccaaagcgcagttcgcggcggccggcggccgctacgagcacggggccctggccacccacgtcgtgatcgccacgttggtgcgccacggggtgctaccggcggccccgggcgacgttccccgagacaccagcacccgcgtgaaccccgacgacgtggcccaccgcgacgacgtcaaccgcgccgccgccgcgtttttggcacgcggccacaacctcttcctgtgggaggaccagacgctgctgcgggcgaccgccaacaccattacggccctggccgtgcttcggcggctcctcgcgaacggcaacgtgtacgcggaccgcctcgacaaccgcctgcagctgggcatgctgatcccgggagccgtcccggcggaggccatcgctcggggggcgtccggattggactcgggcgccataaaaagcggcgacaacaacctggaggcgctgtgcgttaactatgtacttccgctgtatcaggcagaccccacggtcgagctgacccagttgtttccggggctggccgccctgtgcctggacgcccaggcggggcggccactggcgtcgacgaggcgcgtggtggatatgtcgtcgggcgcccgccaggcggcgctcgtgcgcctcaccgcgctggagctcatcaaccgcacccgcacaaacaccacccctgtgggggagattattaacgcccacgatgccttggggatacaatacgaacagggcctggggctgctcgcccagcaggcacgcatcggcttggcgtcgaacgccaagcgattcgccacgttcaacgtgggcagcgactacgacctgttgtactttttgtgtctcgggttcattccccagtacctgtccgtggcctagggaagggtgggggtggtggtggtggggtgtttttctgttgttgttgtttctggtccgcctggtcacaaaaggcacggcgccccgaaacgcgggctttagtcccggcccggacgtcggcggacacacaacaacggcgggcccgtgggtgggtaagttggttcgggggcatcgctgtattcccttgcccgcttccacccccccttcccgttttgtttgtttgtgcgggtgcccatggcgtcggcggaaatgcgcgagcggttggaggcgcctctgcccgaccgggcggtgcccatctacgtggccgggtttttggccctgtacgacagcggggacccgggcgagctggccctggacccagacacggtgcgtgcggccctgcctccggagaaccccctgccgatcaacgtagaccaccgcgctcggtgcgaggtgggccgggtgctcgccgtggtcaacgaccctcgggggccgttttttgtggggctgatcgcgtgcgtgcagctggagcgcgtcctcgagacggccgccagcgccgctatttttgagcgccgcggacccgcgctctcccgggaggagcgtctgctgtacctgatcaccaactacctgccatcggtctcgctgtccacaaaacgccggggggacgaggttccgcccgaccgcaccctgtttgcgcacgtggccctgtgcgccatcgggcggcgccttggaaccatcgtcacctacgacaccagcctagacgcggccatcgctccgtttcgccacctggacccggcgacgcgcgagggggtgcgacgcgaggccgccgaggccgagctcgcgctggccgggcgcacctgggcccccggcgtggaggcgctcacacacacgctgctctccaccgccatcaacaacatgatgctgcgtgaccgctggagcctcgtggccgagcggcggcggcaggccgggatcgccggacacacgtaccttcaggcgagcgaaaaatttaaaatatggggggcggagtctgcccctgcgccggagcgcgggtataaaaccggcgccccgggtgccatggacacatcccccgccgcgagcgttcccgcgccgcaggtcgccgtccgtgcgcgtcaagtcgcgtcgtcgtcgtcttcttcttcttcttttccggcaccggccgatatgaaccccgtttcggcatcgggcgccccggcccctccgccgcccggcgacgggagttatttgtggatccccgcctctcattacaatcagctcgtcaccgggcaatccgcgccccaccacccgccgctgaccgcgtgcggcctgccggccgcggggacggtggcctacggacaccccggcgccggcccgtccccgcactacccgcctcctcccgcccacccgtacccgggtatgctgttcgcgggccccagtcccctggaggcccagatcgccgcgctggtgggggccatcgccgccgaccgccaggcgggtgggcttccggcggccgccggagaccacgggatccgggggtcggcgaagcgccgccgacacgaggtggagcagccggagtacgactgcggccgtgacgagccggaccgggacttcccgtattacccgggcgaggcccgccccgagccgcgcccggtcgactcccggcgcgccgcgcgccaggcttccgggccccacgaaaccatcacggcgctggtgggggcggtgacgtccctgcagcaggaactggcgcacatgcgcgcgcgtacccacgccccctacgggccgtatccgccggtggggccctaccaccacccccacgcagacacggagacccccgcccaaccaccccgctaccccgccgaggccgtctatctgccgccgccgcacatcgcccccccggggcctcctctatccggggcggtccccccaccctcgtatccccccgttgcggttacccccggtcccgctcccccgctacatcagccctcccccgcacacgcccacccccctccgccgccgccgggacccacgcctccccccgccgcgagcttaccccaacccgaggcgcccggcgcggaggccggcgccttagttaacgccagcagcgcggcccacgtgaacgtggacacggcccgggccgccgatctgtttgtgtcacagatgatggggtcccgctaactcgcctccaggatccggacttggggggggtgtgtgttttcatatattttaaataaacaaacaaccggacaaaagtatacccacttcgtgtgcttgtgtttttgtttgagagggggggtggagtggggggggggaaagtgggccgaatgacacaaaaattaggtcggaggggtgagggggggctaggagccgaaccgatggcccccacacgcgacggaaggcccggaagactaccacggggagggggtgtggaaagcgaccggtcgcagggagacggggttggtttggggttggttttcccgttagcacatgtctgcatttgtttttctagtcacacgcccccccccaaataaaaaccaaggcaaaacaataccagaagtcatgtgtatttttgaacatcggtgtctttttatttatacacaagcccagctcccctcccctcccttagagctcgtcttcgtctccggcctcgtcctcgttgtggagcggagagtacctggctttgttgcgcttgcgcagaaccatgttggtgaccttggagctgagcagggcgctcgtgcccttctttctggccttgtgttccgtgcgctccatggccgacaccaaagccatatatcggatcatttctcgggcctcggccaacttggcctcgtcaaacccgcccccctccgcgccttcctccccctccccgcccacgcccccggggtcggaagtcttgagttccttggtggtgagcggatacagggccttcatgggattgcgttgcagttgcaggacgtagcggaaggcgaagaaggccgcgaccaggccggccaggaccagcagccccacggcaagcgccccgaaggggttggacataaaggaggacacgcccgagacggccgacaccacgccccccactactcccatgacgaccttgccgaccgcgcgccccaagtcccccatcccctcgaagaacgcgcacagccccgcgaacatggcggcgttggcgtcggcgcggatgaccgtgtcgatgtcggcaaagcgcaggtcgtgcagctggttgcggcgctggacctccgtgtagtccagcaggccgctgtccttgatctcgtggcgcgtgtagacctccaggggcacaaactcgtggtcctccagcatggtgatgttcaggtcgatgaaggtgctgacggtggtgacgtcggcgcgactcagctggtgagagtacgcgtactcctcgaagtacacgtagcccccgccgaagatgaagtagcgccggtggcccacggtgcacggctcgagcgcgtcgcgggtgaggcgcagctcgttgttctcgcccagctgcccctcgatcagcgggccctggtcttcgtaccgaaagctgaccagggggcggctgtagcacgtccccggccgcgagctgacgcgcatcgagttctgcacgatcacgttgtccggggcgacgggcacgcacgtggagacggccatgacgtctccgagcatgcgcgcgctcacccgccggccgacggtggcggaggcgatggcgttggggttgagcttgcgggcctcgttccagagagtcagctcgtggttctgcagctcgcaccacgcgacggcgatgcgccccagcatgtcgttcacgtggcgctgtatgtggttatacgtaaactgcagccgggcgaactcgatcgaggaggtggtcttgatgcgctccacggacgcgttggcgctgggcgcctcccgcagtggcgcgggcgtggcattccggggcttgcggtcctgctcccgcatgtactcccgcacgtacagctcggcgagcgtgttgctgaggaggggctggtacgcgatgaggaagccccccgtggccaggtagtactgcggctggcccaccttgatgtgcgtggcgttgtacttgcgcgcaaacatgcggtcgatggcctcgcgggcatcccggccgatgcagtcgcccaggtcgacgcgcgagagcgagtactcggtcaggttggtggtgaaggtggtcgagatggcgtcggaggagaagcggaaggagccgccgtactcggcgcggagcatctcgtccacctcctgccacttggtcatggtgcagaccgccggtcgcttcggcacccagtcccaggccacggtaaacttgggggtcgtcagcaagttgcgggtcgtcggcgacgtggcccgggccttcgtggtgaggtcgcgcgcgtagaagccgtcgacctgcttgaagcggtcggcggcgtagctggtgtgctcggtgtgcgacccctcccggtagccgtaaaacggggacatgtacacaaagtcgcccgtcgccagcacaaactcatcgtacgggtacaccgaccgcgcgtccacctcctcgacgatgcagttgaccgtcgtgccgtaccgatggaacgcctccacccgcgaggggttgtacttgaggtcggtggtgtgccacccccggctcgtgcgcgtggcgaccttcgccggcttgagctccatgtcggtctcgtggtcgtcccggtgaaacgcggtggtctccatgttgttccgcacgtacttggccgtggagcggcagacccccttggcgttaatcttgtcgatcacctcctcgaagggaacgggggcgcggtcctcgaatatccccataaactgggagtagcggtggccgaaccacacctgcgacacggtcacgtctttgtagtacatggtggccttgaatttgtacggggcgatgttctccttgaagaccaccgcgatgccctccgtgtagttctgcccctccgggcgcgtcgggcagcggcgcggctgctcaaactgcaccaccgtggcgcccgtcgggggcgggcacacgtaaaactgggcatcggcgttctcgaccttgatttcccgcaggtgcgcgcgcagcgtggcgtggccggcggcgacggtcgcgttggcgtcggggggcggggtcgcctcgggccgctcgggcggctttttggttttccgcttccgggccctggtggtcgcggggctcgggacggggggcggccgggaggcgggacccccgttcgccgcgacggtcgcggccacgccgcccgaggcgcggggggccgccggggccgccgacgccaccgcggccaccagcgcccccacgaccagcgcgcaaaccaagccccccccgcgcatggcgggcctacgggggcgcgtcgctcccgccgcccgctagtctgggggcgaggtgctgcaggaccgagtagaggatggaaaaaacgtctcggtcgtaaaccacgaccgagcggggtccgatgcagccgtcggggccgctctcgacgatggccaccagcggacagtcggagttgtacgtgaggtacacgcccggcgggtagcggtacagaccttcggaggtcgggcggctgcagtcggggcggcgcaactcaagctccccgcaccggtagaccgacgcaaagagtgtggtggcgataatgagctcgcgaatatatcgccaggcggcgcgctgggtgggcgtgattccggaaacaccgtcaaaacagtagaacttttgaaactcgctgacggcccaatcagcgcccgaaccccccgcgcccatgatgaagcgggcgagttcctccttgaggtgcggcaggagccccacgttctcgacgctgtagtacagcgcggtgttggggggctgggcgaagctgtgggtggagtggtcgaacaggggcccgttgacgagctcgaagaagcgatgggtgatgctggggagcagggccgggtccacctggtggcgcagcagcgacgctcgcatgaaccggtgcgcgtcaaacacgcccggggcggcgcggttgtcgatgaccgtgcccgcgcccgccgtcagggcgcagaagcgcgcgcgcgccgcgaagccgttggcgaccgcggcgaaggtcgcgggcagcacctcgccgtggacgctgacccgcagcatcttctcgagctccccgcgctgctcgcgcacgcagcgcccgaggctggccagcgaccgcttggtcaggcggtccgcgtacagccgccggcgctcccgcacgtccgcggcggcccgcgtcgcgatgtcgccccagctctccggcccctgcgcccctggctcggggccgcgctccccgtcctcgctcgcgggcgtccccgcgccacgcctccgccccccctcctccgcggcggcccggggctcttcctcctcggcccccccggtcgcgccgccggcccccagccgcgccagcacgcggcgcagcgcctcctcgtcgcactgctcggggctgacgagccgccgcagcagcggcgtcgtcaggtggtggtcgtagcacgcgcgtatcagcgcctcgatctgatcgtcgggcgacgtcgcctggccgccgatgatcagggcgtccaccatgtccagcgccgccaggtggcccccgaacgcgcgatcgaagtgctccgcccgccgcccgaacagcgccagctccacggccaccgcggcggtctcctgctgcagctcgcgctgcgccagcgcgttcaggttgtcggcgaaggcgtccatggtggagtggcgggcgcgatcgccggacgccagccagaagcgcagctcgctgatggcgtacaggccgggcgtagtggcctgaaacacgtcatgcgcctccagcagggcgtcggcctcctcgcggacagaagagctatcggcgggcggcgggccggcccgggccccgccgcccgccgcggtccgcgccagcgcctggtccagcacacagagcgctcgcgcgcgggcggcgtccgacagcccggcggcgtggggcaggtaccgtcgcagctcgttggcgtccagccgcacctgggcctgttgggtgacgtggttacagatgcggtccgccaggcggcgggcgatggtcgccccctggttcgcggtgacgcacagctcctcgaaacagaccgcgcacgggtgggacgggtcgctcagctccgggggcacgatgaggcccgaccccaccgccgccaccataaactcccggacgcgctccagcgcggccgtggcgccgctcgggggggtgatgaggtggcagtagttcagctgcttgagaaaattctcgacatcatgcaggaagcacagctccatgcggacgtccccgccgtacgtctccagccggatctgctggtggtacggacagggtcgggccagacccatggtctcggtgaaaaaggcagagacgtctcccgtggtcgcgaacgtttccaggtggcccaggagccgctccccctcgcgccacgcgtactccaggagcaactccagggtgaccgacagcggggtgagaaaggcggcggcctgagcctccagccccggccgcaggtgccgccgcagcacgcgcacctggagcgcgttgagctttagctgggcgagcttccccaggccgatctgggggtcgcatcgtcgaagcagctctagctgaaaaacgtacgtctgtacctgcccgagcagggccaacagtttctgtcgggccgcagtgggctcggaaacagcggccgggggcgcggccgccatggcgagtcacccggccgtgctgtggtttagttaaggtttgggggggggtgggtcagaggcgcgccccgcgcggactgatgcggcggcgggcccctgacatcccctctttatgcccgccgcccgccccgccggtgtgccgtgattcgcggagtcggggccttgtgtttctttctttccccccgaatccgttctttcttcctcaccccccccctccccacacacccacccaggactcgccaccacaaggaggcgagagcccgtcgctaacccaaagacacagtcacgagacacgatatcgactgtagttgcgatcgtttattttatacacaacaccaacctttccttcgaccccccccacccccgcccctagagcatatccaacgtcaggtcctttttctccggtggtccctccccaaacggatcgtcgccgtgaaacgcccgctttcgggcgacgccggccgccgccgccaaaccgccgaacgacgccgcgtggtcatcctcgtcgccgaaatccccaaagttaaacacctccccggcggcgccgagctggctgaccagggcctccgcctcgtgggccacctccagggccgcgtcggtcgaccactcgccgtgcccgcgctccagggcgcgggtggtaaactccatcatttcctcgctcaggtactcgtcctccagcagcgccagccagtcctcgatctgcagctgctgggtgcgggggcccaggctcttgacggtcgccacaaacacgctgctggcgaccgccgccccgccctccgcaatgatgccccggagctgctcgcacagcgaatgctcgtgggccccgcccccgagactcgacgccgcgcacacaaacccggccctggggcaggccaggacaaacttgcgggtgcggtcaaagatcagcagcgggcacgcgtttttgccgcccagcaggctggcccagttcccggcctgaaacacgcggtcgttgccggccatgccgtagtatttgctgatgctgaggcccagcacgaccatcgggcgcgcggccatcacgggccgcagcaggttgcagctcgcgaacatggacgtccaggcgccggggtgcgcgtcgagggagtccatcagcgcgcgggccccggcctccaggcccgcgccgccctgcggggcccaggcggccgccgcctgcacgctggggggacggcgggacccggcgatgacggccgtgagggtgtttatgaagtacgtcgagtggtcgcagtacctcaagatctggttggccatgtagtacatggccagttcgctcacgttattgggggccaggttgataaagttaatcgcgccgtagtccagggagaacctcttaatgaacgcgatggtctctatgtcctcgcgcgacaagagccgggcggggagctggttgcgctggagggcggtccagaaccactgcgggttcggctggttcgaccccgggggcttgccgttgggaaagatgaccgcgtggaactgcttcagcaggaagcccagcggtccgaggaggatgtccacgcgcttgtcgggcttctggtaggcgctctggaggctggcgacccgcgccttggcggcctcggacgcgttggcgctcgcgcccgcgaacaacacgcggctcttgacgcgcagctccttgggaaaccccagggtcacgcgggcaacgtcgccctcgaagctgctctcggcgggggccgtctggccggccgttaggctgggggcgcagatagccgccccctccgagagcgcgaccgtcagcgtcttcgccgacaggaacccgttgttgaacaggtccatgacgcgccgccgcagcaccggttggaattgattgcgaaagttgcgcccctcgaccgactgcccggcgaacaccccgtggcactggctcagggccaggtcctggtacacggcgaggttggaccgccgcgcgaggagctgcagcagggggcacggcccgcaggtgtacgggtccagcgacagcgacatggcgtggttggcctcggccagaccgtcgcggaacttaaagttgcgcccctcgatcaggttgcgcatcagctgttccacctcgcgatccaccagctgcttgatgttgttcaccaccgtgtgcagggcctcgcggttgccgataatcgtctccagcctccccagggccgtgggcaccgcctggtccacgtactgcagggcctcgagctcggccatgacgcgctcggtggccgcgcggtacgtctcctgcatgatggtccgggtgttctcggacccgtccgcgcgcttcagggccgagaaggcggcgtagttccccagcacgtcgcagtcgctgtacgcgctgttcatcgttccgaagaccccaatggccccccgggcggcgctcgcgaacttggggtggcgggcccgcagccgcatcagcgtcgtgtgcgcgcaggcgtggcgggtctcgaaggtacacaggttgcagggcacgtcggtctggcccgagtccgcgacgtagcgaaacacgtccatctcctggcgcccgacgatgactccgccgtcgcagcgctccaggtaaaacagcatcttggccagcagggccggagagaacccgcacagcatggccaggtgctcgccggcgaactcctgggttccgccgacgaggggcgccgtggggcgcccctcgtacccgggcaccacgtggccctcgcggtccagctgcgggttggccgccacgtgcgtgccgggcacgagaaagaagcggtaaaaggagggcttgctgtggtccttggggtccgccggcccggcgtcgtccacctcggtcaggtggagggccgagttggtgctgaacaccatggcgcccacgaggcccgcggcgcgcgccaggtacgccccgacggcgccggcgcgggccgcgggcgtttcctggccctcaagcaggggccacgtggtgatgtcggggggcggctcgtcaaagaccgccatcgacacgatggactccagggccagggcggcgtcgcccgccatcaccgaggccaggcgctgctcaaacccgcccgccgggcccttgttcccggcgtcgcgcgcgccccgctggggcttaccctggctggcctcgaaggccgtgaacgtaatgtcggcggggagggccgcgccctcgtggttttcgtcgaacgccaggtgggcggccgcgcgggccacggcgtccacgttccgggcacgcagggccacggcggcgggcccgacgaccgcctcgaacagcaggcgggcgagggggcggttgaaaaacggaagggggtagttgaaattctccccgatcgatcggtggttgcagttaaacggatcggcgatgacccggctaaaatccggcataaacatctgcagcggatacacggggatgcggtgaacctccgcgtccccgatggttaccttgtccatcccgcccaggtgcaggaaggtgttgctgatgcacacggcctcccggaagccctccgtgatcaccagatacagcaaggcccggtccgggtccagtccgagtcgctcgcacagcgcgtcccccgtcgtctcgtgttttaggtcgcagggccggggcgcgtagtccgagaagccaaaatggcggcgcgcccgctcgcagagccgcgtcaggttgggggcctgggtgctgggggccaggtggcggccgccgtgaaagacgtagacggacgggctgtagtgcgagggcataagcttgagggacaccgcggtccccccaaggcccgtcgtgcgggacccgacgaccgcggccacgttggcctcaaacccgctctccacggtcaggccgacgatgaggggcgcgacggcgacgtccgcgtcgccgctgcgcgccgacagtagcgacagcagctccaggccttcggccggacaggcgcggccatacacgtaccccatcggccccggaggaaccttgacggtggtcgtcgttttgggcttggtgtccatggctttcgggagatcggcgaccggcaggaacgggggcccggcaagacgaccgggggcagacgggggaggccgcgcgtggtcgacggctgctgcccgccgtcgtctcaccgatggggtcgaatgccggcgctgggggtggggtctacacccgcccgttcaccgagcggcccctggtgggggtgggatgggtgggatggggtgggcaagaatggcccgccaccggaacgcgccggacgggggccccggggttgggcaaggtttgggcgcaaggctccagcggcgattcgagaggcctgcggatggcggcccagagctgggtatgctcggccggggcggccggtatatgtacggcgtgctgggaggggcggcatcgggccccgcccacggtccgccacgccccgcgcgtcatcggcagggggcgtggccgcccttctaaaaaaagtgagaacgcgaagcgttcgcactttgtcctaatagtatatatactattaggacaaagtgcgaacgcttcgcgttctcactttttttagaagggcggccacgccccctttgacgtcacgctcacccgggcggccggccgcccataagcgcggcctgccgggccgataaaaagaaaccgcggcgcccccgcggacaccacacactggctctcgaaccccggacgcgcagaagggacccgggcgcgggtccgccggtaagagccggggggaacatcggcaccgccatcccaccccgagctgttgggtgggcgggtgggggggctggtgaggcggtggtgggagggggcggcgtatagcaggacaacgaccggcggcgatgttttgtgccgcgggcggcccgacttcccccggggggaagtcggcggctcgggcggcgtctgggttttttgccccccacaacccccggggagccacccagacggcaccgccgccttgccgccggcagaacttctacaacccccacctcgctcagaccggaacgcagccaaaggcccccgggccggctcagcgccatacgtactacagcgagtgcgacgaatttcgatttatcgccccgcgttcgctggacgaggacgcccccgcggagcagcgcaccggggtccacgacggccgcctccggcgcgcccctaaggtgtactgcgggggggacgagcgcgacgtcctccgcgtgggcccggagggcttctggccgcgtcgcttgcgcctgtggggcggtgcggaccatgcccccgaggggttcgaccccaccgtcaccgtcttccacgtgtacgacatcctggagcacgtggaacacgcgtacagcatgcgcgccgcccagctccacgagcgatttatggacgccatcacgcccgccgggaccgtcatcacgcttctgggtctgacccccgaaggccatcgcgtcgccgttcacgtctacggcacgcggcagtacttttacatgaacaaggcggaggtggatcggcacctgcagtgccgtgccccgcgcgatctctgcgagcgcctggcggcggccctgcgcgagtcgccgggggcgtcgttccgcggcatctccgcggaccacttcgaggcggaggtggtggagcgcgccgacgtgtactattacgaaacgcgcccgaccctgtactaccgcgtcttcgtgcgaagcgggcgcgcgctggcctacctgtgcgacaacttttgccccgcgatcaggaagtacgaggggggcgtcgacgccaccacccggtttatcctggacaacccggggtttgtcaccttcggctggtaccgcctcaagcccggccgcgggaacgcgccggcccaaccgcgccccccgacggcgttcggaacctcgagcgacgtcgagtttaactgcacggcggacaacctggccgtcgagggggccatgtgtgacctgccggcctacaagctcatgtgcttcgatatcgaatgcaaggccgggggggaggacgagctggcctttccggtcgcggaacgcccggaagacctcgtcatccagatctcctgtctgctctacgacctgtccaccaccgccctcgagcacatcctcctgttttcgctcggatcctgcgacctccccgagtcccacctcagcgatctcgcctccaggggcctgccggcccccgtcgtcctggagtttgacagcgaattcgagatgctgctggccttcatgaccttcgtcaagcagtacggccccgagttcgtgaccgggtacaacatcatcaacttcgactggcccttcgtcctgaccaagctgacggagatctacaaggtcccgctcgacgggtacgggcgcatgaacggccggggtgtgttccgcgtgtgggacatcggccagagccactttcagaagcgcagcaagatcaaggtgaacgggatggtgaacatcgacatgtacggcatcatcaccgacaaggtcaaactctccagctacaagctgaacgccgtcgccgaggccgtcttgaaggacaagaagaaggatctgagctaccgcgacatccccgcctactacgcctccgggcccgcgcagcgcggggtgatcggcgagtattgtgtgcaggactcgctgctggtcgggcagctgttcttcaagtttctgccgcacctggagctttccgccgtcgcgcgcctggcgggcatcaacatcacccgcaccatctacgacggccagcagatccgcgtcttcacgtgcctcctgcgccttgcgggccagaagggcttcatcctgccggacacccaggggcggtttcggggcctcgacaaggaggcgcccaagcgcccggccgtgcctcggggggaaggggagcggccgggggacgggaacggggacgaggataaggacgacgacgaggacggggacgaggacggggacgagcgcgaggaggtcgcgcgcgagaccgggggccggcacgttgggtaccagggggcccgggtcctcgaccccacctccgggtttcacgtcgaccccgtggtggtgtttgactttgccagcctgtaccccagcatcatccaggcccacaacctgtgcttcagtacgctctccctgcggcccgaggccgtcgcgcacctggaggcggaccgggactacctggagatcgaggtggggggccgacggctgttcttcgtgaaggcccacgtacgcgagagcctgctgagcatcctgctgcgcgactggctggccatgcgaaagcagatccgctcgcggatcccccagagcacccccgaggaggccgtcctcctcgacaagcaacaggccgccatcaaggtggtgtgcaactcggtgtacgggttcaccggggtgcagcacggtcttctgccctgcctgcacgtggccgccaccgtgacgaccatcggccgcgagatgctcctcgcgacgcgcgcgtacgtgcacgcgcgctgggcggagttcgatcagctgctggccgactttccggaggcggccggcatgcgcgcccccggtccgtactccatgcgcatcatctacggggacacggactccattttcgttttgtgccgcggcctcacggccgcgggcctggtggccatgggcgacaagatggcgagccacatctcgcgcgcgctgttcctccccccgatcaagctcgagtgcgaaaaaacgttcaccaagctgctgctcatcgccaagaaaaagtacatcggcgtcatctgcgggggcaagatgctcattaagggcgtcgacctggtgcgcaaaaacaactgcgcgttcatcaaccgcacctccagggccctggtcgacctgctgttttacgacgataccgtatccggagcggccgccgcgttagccgagcgccccgcagaggagtggctggcgcgacccctgcccgagggactgcaggcgttcggggccgtcctcgtagacgcccatcggcgcatcaccgacccggagagggacatccaggactttgtcctcaccgccgaactgagcagacacccgcgcgcgtacaccaacaagcgcctggcccacctgacggtgtattacaagctcatggcccgccgcgcgcaggtcccgtccatcaaggaccggatcccgtacgtgatcgtggcccagacccgcgaggtagaggagacggtcgcgcggctggccgccctccgcgagctagacgccgccgccccaggggacgagcccgcccccccagcggccctgccctccccggccaagcgcccccgggagacgccgtcgcatgccgaccccccgggaggcgcgtccaagccccgcaagctgctggtgtccgagctggcggaggatcccgggtacgccatcgcccggggcgttccgctcaacacggactattacttctcgcacctgctgggggcggcctgcgtgacgttcaaggccctgtttggaaataacgccaagatcaccgagagtctgttaaagaggtttattcccgagacgtggcaccccccggacgacgtggccgcgcggctcagggccgcggggttcgggccggcgggggccggcgctacggcggaggaaactcgtcgaatgttgcatagagcctttgatactctagcatgagccccccgtcgaagctgatgtcccgcatcttgcaataaatgtctgcggccgacacggtcggaatttccgcgtccgctggtttctctgcgttgcgtctgaccacgagcacaaacgtgctctgccacacgtgggcggcgaaccggtagccggggcacgcggtcagcatccgatcgatgagccggtagtgcaggtgggccgacgtgccggggaagatgacgtacagcatgtggcccccgtacgtggggtccgggtaaaaaagaaaccgggggtcgcacgccccccctccgcgcaggatcgtgtgcacgaaaaagagctcgggctggccgagcgtatcggccaggaggtcctggaggggggtgctgtggcggtcggccagcacgaccagggaggccagaaaggtgcggtgctcaaagatcgtattgatctgctgcacgaaggccaggatgagggcctcgcggctgacggtggccagccgcccgtcgcccgcgctgcacgcggggcagcagcccccgatccccaggtagtagcccatgcccgagagggtcaggcagttgtcggccacggtctggtccaggctgaaggggagcgacacgggggtcgtcttcaccaggggcacggagagcgagcgcacgatggcgatctcctcggagggcgtctgggcgagggcggcgaagaagccgcggtagcgacggcgctcgtgcaggcagagctccagcctgcgcgcgtgcgacggcaggctcttgcgggaggcccggcgctccacgccggggttcccggcggcggaaaagcgcgaccgccgccgggtcttgtcgcggccgggcccgggccgggagccggagcgacggggggcgatgtcatacataggtacagagggtgtgctccagggacaggagagagatcgagtgtcgtctgagcagcgcgccggcctcgcggacaaatgtggccagcgcggtgggcttcggcacaaatacctggtacgtcttgaaggtgtagatgagggcccgcagggctatacagacccgcccctcgaactcgttgccgcaggccaacttggccttgtgaagctgcagctcgtcgcgatggtcggcgcgggggtggccaaacaggacccaggggtcgacttccatctccgtgatggcgcacatcggatcgcagaacatgtgcttgaagatggcctcggggcccgcggcccgaagcaggctcacgaaccggcccccgtccccgggctgcgcctcggggtccgcctcgagctggtccacgaccggcactatgcagtcgaagaggctggtgttgttctccgagtagcggacgacggacgccctcaggcgtcgcatggccagccagtaggcccgcaccagcaacagattgcacagcaggcattccccgccggtgcgcccgcggccccggccgtgcttcagcacggtggccatcagcggccccaggtccaggtcgggctgggcctggggctcggcgaactgcgcaaagcgcggggccgcgtcgcgcatgcgcgccctgcggtgcgcttcccaggactcgctgaccgcggcgcggcgggcgtccgcggcggcgcgcagccggggccccgactcccagacggcgggggtgccggcgagcagcagcaggatcaggtcggcgtacgcccacgtctccggctcacccccctgcgccagcgccccggcggcggcctcgaactccccgttgcgggcggcggcgcgcgtgcagcagctgtctccgcccccgcgcttgccctcggtgcagtcgagcaggcgggcgcagtccttccagttcatcagggcggtggtgagggagggttgcgttcccgagcccccgcccgcccccgcccccgccccgtcatcgcccccggaggccagggtcccgatgagggcccgggttgcggactgcgcgaggaaggaatagttggagtactgcaccttggcggcgcccggggagggcgtcggcctgggttgcttctgggcgtggcgcccgggcaccccgccgtcggtccggaagcagcagtggagaaagaaatgccggtggatgtcgttgatggtcagggcgaagcgcgcgaaggagccgacaagggtcgccttcttggtgcgcaggaagtggtggtccatgacgtagacgaactcgaaggcggccacgaagatgctcgcggcgcagtggggcgcgcccaggcacttggcgcagaggaacgcgtaatcggccacccactggggcgagaggcggtaggcctgcttgtacagctcgatggtgcggcagaccagacaggggcggtccagcgcgaaggtgtcgacggacgccgcggcgaagggccccgtgtccaagagtccctctgccgtggggtctgcgggcgggccgcgggcggaccccggcccccgcccccccgaagcctcgcgcgcggccccgcgcggccgcgggggggcgggcgcgacgtcgctctccacgtcctcgtcgagcgcgctcgcgggcggcacgcctaccacgtgacaggccgccaggagctcggcgcacagggcctcgttaagagccagaaggtcgggatcgaaggccacatacggacgctcgaacgcgccctccttccagctgctgcccggcgactcttcgcgcacggcggcgctcgacggcacccccagggcggacgtcgccatggccggtcgagcggggcgcacgcgtccgcgaacgttacgggacgcgatccccgactgcgcgctgcggtcccagaccctggaaagtctagacgcgcgctacgtctcgcgagacggcgcgggggacgcggccgtctggttcgaggacatgacccccgccgaactagaggttatattcccgaccacggacgccaagctgaactacctctcgcggacgcagcggctggcctccctcctgacgtacgccgggcctataaaagcgcccgacggccccgccgccccacatacgcaggacaccgcgtgcgtgcacggcgagctgctcgcccgaaagcgcgaacggttcgcggcggtcattaaccggttcctggacctgcaccagatcctgcggggctgacgcgcgcttcggcggggcaccggcaccgggaccgacttgtttacataacagtagggggtgggggaacgcgcaccattgcccggtcgcgatggcggggatggggaagccctacggcggccgcccgggggacgcgttcgagggtctcgttcagcgcatcaggctcattgttcccgccacgctgcgcggcgggggtggggagtcgggcccctactcgccatccaacccgccctcgagatgtgccttccagttccacggccaggatgggtccgacgaggccttcccgatcgagtacgtcctgcggctcatgaacgactgggccgatgtgccctgcaacccctacctgcgcgtgcagaacaccggcgtttcggtgctgtttcaggggttttttaaccggccccacggcgccccggggggcgcgatcacggcggagcagaccaacgtgattctgcactccaccgagacgacgggactgtccctcggagacctggacgacgtcaaggggcgcctcggcctggacgcccggccgatgatggccagcatgtggatcagctgctttgtgcgcatgccccgggtgcagctcgcgtttcggttcatgggccccgaggacgccgttcgcacgcggcggatcctgtgtcgcgccgccgagcaggccctcgcccgtcgccgccggtccaggcggtcccaggatgactacggggcggtggcggtggcggcggcgcaccactcttccggagcgcccgggccgggggtcgccgcctcgggcccgccagcgccgcccggacggggaccggcccgtccgtggcatcaggccgtgcagttgttccgggccccgcgtccgggccccccggcgcttctgttgctggcggcggggctgtttctgggggccgctatctggtgggcggttggcgcgcgcctatgaaagggggcgagccaccgtcccgcccgccagtgcatcccagacgcccgcgagccgcacatcccctccgctcccgcctccggcccgattcttacggcgcgacccaaggtcccgatggccgccccgcagtttcaccgccccagcaccattaccgccgacaacgtccgggcgctcggcatgcgcgggctcgtgttggccaccaacaacgctcagttcatcatggataacagctacccgcatccgcacggaacgcagggtgcggtgcgagagtttcttcgcgggcaggccgcggcgctgacggacctcggggtgacccacgccaacaacacgttcgccccgcagcctatgttcgcgggcgacgccgcggccgaatggctgcggccctcgttcggtcttaagcgcacgtattccccctttgtcgttcgcgaccccaagacccccagcaccccgtgagtcctcggcgggtccctccgcggccgtctctcgttgccccccctttccccttcccgggtggttcaataaaaaacaccaacatacgatattcgcgtttgatacgtttattgggggggtgtagggcccaacgatcggcgattaacaacaccaaacaatcgagtgcgtctaacccagtaacatgcgcacgtgatgtaggctggtcagcacggcgttgctgcgctgaaacagcgccctgcgggtccgctgcagctgttgttgtatgcggcggcatgcgcggatcaaaaccgccagggcgctacgaccggtgcttcgtacgtagcgtcgcgacaagacggcatttgcctgtacgggcaaggggccaaattgcgagtgtggtgactggaggtggtcggcggccaatgggccgggtggttcgtcggcggggggcaagtgcggttccggtgggagggggtcgagcgcctcggtatcatccgagtccgagaaacgcagggagtctgcgtcggagtgttcatcatcggaggagatgtgcagcgtctgaagcagcgatgcgggtgggggcgcggagtcgacgtgaagcgccagagaggaagcccacgaagtcacagcggacactgggaggtgggtgtttgtatgtgtgggagactcgggtgtcgggaccgagtctcggctctggggtgtaagcgtccgagttacgggcggcaggggcggctggggcaggggcggctggggcaggggcggctggggcaggggcggctggggcaggggcggctggggcaggggcggctggggcaggggcggctggggcaggggcggctggggcaggggcggctggggcaggggcggctggggcaggggcggctggggcaggggcggctggggcaggggcggctggggcaccgagcgcgcgcggatgcgcgtccgcgcggcgggtttggtcgcgggtgactggggtggggggcggcgggcaaccgggcctccgggcacgacccaaccgcacaaaggctcgctcggggcaaccgggcctggggccaaaggcggggggctggtctggacggcggaggtcgggggggcaaggcccggagaaggcggcactgccgccgctgcggcggaaaccgcggccgcgtggtcggctgggtcccggggagaggggagggagttcaacgaggccgagagcgaggcgaccgcggggcgcgtgaggcgccggggtgggccggccgcggggccccgggggggtgtcggcgagggacccgctgttgtctggcggcggccgcggcggcggtcgcccccggggacgaccgctccttcggcgggcggaggcgggatgggcgcgagcgtgggggcgggaaaggccccgcgagccgaggcggggccgggcggaaggggcaaagcagaaacccaagccgggggcgcggactccggggtgggcggctggtcgggaggacgcgcggaagcggcgaccggggcgaccggggcggggagtgccggcggacgccacccctcggggggggcggaggcccggggcgcgcgcgatttggcacgcgtccggcgggacctgcgcacgcgcggcacggcggcggagaaagcggcggcagagccggaaaaggccgggggaggaagcgcggcatccgcggggggactcggtgtgggtggcgagggccgtgggtcgtcgcgaggggccacgggcacgcgccccgtgttttgttgaggcgggacactcggtcgtgtttcgcaagccgtagctgccggcccaatgggccgcggtgcgtactgggacgtggggacggactgatcggtggcggggggaggaagaagggccggggccggattgggcgtggggccgccggcgtcgtcggacgccagctcctccaggccgtggatccaggcccacatgcgaggggggacgggctcgccggtggtggcgtcggtgaggagagtgggggcgaggacccccgggtccgcctgccgtgcggggggggcagcggggtcctcgggacccgatccgccatccccccccgcaaggtcccgcgggtcgcgggcggcggtcggggcagagggacctgcctcgtcggcgagggggcgctggtaaaccgggtgtcccgggaacagctcccccgtcaggagggaggcgtcgaagggccgcccgaggatggcccgcgcgaagaaggggtccgcgtcggcggcgctcgccgcgagaacgtcccccgcggtagccacaaacggaagctcctcggtggcctcgctgcccacaaaccgcacgtcaggggggccggggggctccggggcttcccacaagaccgcgaccggggtcatggagatgtccacgaggaccaggcacgggggcccgtcggcgagagggcgctcggcgatgagcgccgacaggcgcgggagctgcgccgccagacacgcgttttcgatcgggttgagatcggtgtggaggaggccgacggcccacgtctcgatgtcggacgacacgacgtcgcgcagggcggcgtccggcccgccggggcgcgagtcgaagagcgtcaggcacagttccagttccgactcgcgggagaaggccgtggtgttgcggagcgccaccacgacgggcgcgccgaggagcaccgcggccagaaccaggtccatggccgtaacgcgcgcggcgggggtgcggtgggtcgcggcggccagcacggccacgtgctggcccgtgggtcggtagagggcgtggggggcctcggggagggacgcctcgcgcccccccgccgggccgagcgtctggccagactccaggcgtgcggccaggagggcgtcgaagctgtcgtactcggtgtagtcgtcgggaaacatgcaggtccacagcgcggccaaagcggcgctcggcagacacatgcgcccgaggacgctcaccgccgccagggcctgggccggactgagcttcccgagcgccggggcgtcccggcgctgggtcccgagctccaaggccgagcgccagggcgccagcgggtcggtttcggacagcttgccccggcgccagtcggccagccgcgtgccgaacaggaggccccgggtcggggggcccccgtccaaaaacgtcggcaacacgcggatgcgggcgtcgggatgcggggtcaggcgctggacgaacagcatggactccgctgcgtcctcgaacgcgcgttcgagggtgaggtgcatgtactcgtgctggcgaacgaggtccaggcgccagaagttgtagatgtgttccggaacgccggccaccagcgcgaccagcacgtcgttctcgttgaaggcgacgcagtggcgctgggacccccgggggcccggcggcggacgcggcgccgccgctccggacgcccagcccagctgggcccagcgacacccaaactcgcgcgtgagggtggtggcgacgagggcgacgtacagctcggccgccgcgtccatcgaggcgccccacgtcgcctggcgatggcgcacgaagcgaccgaacagctgaaagttggcggcctgggcgtcgctgagggccagctggagccggttcacgacggtcagcacgtacatggccgtgaccgtcggggccgattcgaggacgtccgtcggaagcgggggccgcacgcaggccgcctcgggacgcatcagcagcgcgccgagtttgtcggtgacggccgggaagcatagcgcgtactgcagcggcgttccgtccggggccaaaaagctggtggcgaacggcagatccagagcgctgacggcctcacgcagcaccaggggccccgggtctccgccggcgcgcagatacgcctcgccccggcggcgcagcagctgcgggtcgacctcgtggccctcgggggaagaagaggcccgggcgcgggcgtcgagggcgcgaagatcaacgagcaggggcgcgggcgcggagtccgcgcccgcgcccgtctggccgccggccctggcgtacgcgctatataagcccatgcggtattggatgagttcccgcgcgccccggaactcctccaccgcccacggggccaggtccgcggccgccgcgtcgaactccgccagcaggcgccccagggcgtcaaagttcatctcccagggcaccctgcgcaccacctcatcccgcagccgggcgcacagggcggtgtgcttggtgacgcgcgcgcccagctcctccacggcctccgcgcgctcggcgcccttggcgcccaggacgccctggtacctggcggaaaggcgctcgtaggccggctgggcccgcagccccgacaccgtgttggtggtgtcctgcagggcgcgcagctgctcgtgcatggcgcggaacccctcgggggacttccaggcgcccccccggacgcggccaaagcgaccccagacctcgtcccactccgcctcggcctcctccagggacctccgcagggcgtcgacgcggcgccgagtatcaaagagcgcccccaggcggccggcgtgccgcgccagggggccggggccgtcgccgcgggcggcgcttagcgggtgcgtctcgaaggtgcgctgggcgtgctctagccagataaccgcgggcacgtcgagctcgcgcgttttctcggtctgatccaacagaacctcgacctggtcggcgatctccgccaccgagcgcgcctggtcgagcgtcttggccacggtcgccgggacggcgaccaccttcagcatggtcttgaggttggccaggccctcggcctcgatctgggcccggcgctcgcgcgcggccagcgcctcccgcaggcccgccatgacccgctcggtggcctccgcgcgctgctgtttggcgcgcaccactgcgtccttggtctcggccgtgtcctgccgggtcacgaaggcgacatactcggcgtacgccgtgttcttcacggggctctggtccacgcgctccaacgccgccgcgcacgcgaccagcgcgtcctcgctgggacacggcagggtgaccccggtccggaccagctccgcggtggcctccgggtcattccgggccgcggatatctgctccgcggcggccgccaggtccaggggcacgccgccgagcgcccggtgcacgtcggcccggatggcgtccaggcgatcgcggagctccacgtagtcggcgtagccatgttggaagaacggcacgtaccggcgcaggccgggcacgctcgtcatgtcgtccgccaggcgccccacggcctcgtggtagtcgataaacccgtcgcccgcctgggccatttccaggagcccctccgcgatgcgcagcagccgcgccaggggctcggcgtcgacccgaaacatgtcggcgtaggtttcggcggcggcgtggaacgccgcgctccagccgaggcggtggatggcggcgagcggggggagcatggggtggcgctggttctcgggggtgtaggggttaaacgcgaaggccgtatccagggcgagggtgaccgcctcggcgttggccgcgagcgcctgctcggcgcgcttgcggaagtcccgggggttgtagccgtgcgtgcccgccagcgcctgcaggcggcgcagctcgaccacgtcgaactcggcgcggttctcgacgcggtccagcgccgcctcgacgccggcggcccagcgctcgctgctgccccgggcgcgctgggccgccatcttcgccgtcaggtcggcgacggcggcctcaagttcgtcggcgcggcgtcgcgtggcgccgatgaccttgcccagctcctgcagggcgcgcccgctgggggaatggtccccggccgtcccttcggcgtgcagcaggcccccgaacccagcctcgtgccccgcgaggctttcccgagcagcggtcgtcgcgcgggccgcggcatcgatgagggcggcatggtccccctccggctgggcgcaggcccggcgcgcctggactaccaggtcggcggccgccgaccccagggtcgtgagctcgtcgatggccccccgcgcctccagggccagccgagtcgcctttacataccccgcggcgctatcggccagcgccgcgaggaaggacaggggcgaggccgggtcgcgggcggccgcgcccagggccgacaccgcgtccgccagggcgccatgcgcccgcacggccgcgtccaccgtcgccgcgggacttgccgtcgcgacggcggcgctcccggcgttgatggcgtttgacacggctttggcgattgtgggggcgtgatcggaaaagaactgcacgaggaccggcgtctcgggggcgtcggcgaacagggtcttcagcaccaccacgaaggcgggatgcaggccggccagagccgtcgcggtatccggggttgggtgttccagggcctcccggtactgccccagcagcccccacaggtccgcccgcagcgccgccgtgacttccgggggggggccccggacggcatcggccaggtcggtccaccccgcgggcagggaggcccgcagggtcgccagcacggccggacacgcctttagccccacaaagtccgggaggggccgcaggaccccttggagtttgtgcaggaacttctcccgggcgtcgtgggccaccttggcgcgctcccgcgcgtcgttgagcatcgcctccagggcgtgggcgcgctcccgaagccgggagcgcgcctccggagcgagctccgccgtcatcttggccgcctccatggccctcgcctgccgcagcgcgtcttcggccatgcgcgtggcctcgggggacagcccgcccccgtcgacgtacggcgcggggccggtcgccgggacgaaggccgcgtcgctgtccagctgctgcgcgagcgccgcgtcgagggcgtcgaagcgctgcagttcggccagccccgagctgcgccgcgcctgctggtcgttgatgccgtggatgctgcgcgccagctcttccaggggcttgcgttcgatgagcccctgggtcgcggcgtcggtcaggaccgagagccaggccgccaggtcctcgggggcatctagggtctggccccgctggagcaggtcccgcagcaggatggcctgggggctggtggcgagggggggcgggggggggagcgcggcgcgctgagcgacgtcccgcgtgtgttggtcaaaggccggtagcgattccagcaactggaccatgggcacgaccgcggccgaggccacgtgaaaccgacagtcgtggctgtcgctggcctgcagggccttcgcgctgtatacggctccccggtggaagtactccttgatcgcgctctcgatcgcccggcgggcctggatccgcacgtcctccagccgcgcctggatggcctcggggcccagggcgggcgggcacggggccctgccgccggcgcccggggcggcgggcacgggcatcacggtcaggggcccggcgcgctgcgagaccgagtcgaccccgcgggcgagggcgtctaaggcctcgcgcatctcgcgggcctccgcctcgacccgcatctcttcgccccgggcaaactgggccagcgcctggatccgatggagaagcggctccgggtgcgtcggggtggcgggggcgaacagggtgttcgggtgggcgcgcgagcgctccaggagccactctccgaggcgtgcgtacagattggccggcggggcggcgcgcagctgcagatccaggtccgcgaggtccccgtaaaaggcgtccgtctcccgaataacgtccctggcgaccaggaccagcttagcgagggccaggcgcccgatctgcgaattttcgtccagcacgtgctggatgaggggccggtgggcggccacgtccgccaggctcatgcgcgtggacgccaggaagtccccgacggccgttttgcggggcagcatgcgcagggtgaagtccagcagggccgcggccgggccggccaccccggcctgcgtatgcgcgcgggccccgttctcgatcaaaaaggcgaggacgcgctcaaagaagaagatgacgcagagctccaacagccccgggtgcgccgggtacggcgaccgcagggcgttgatggtgagctgcgaacacgcggccacctcgcgggccagggcggcatcgcgcgccgcgagccggaccgccgtggcggccacattggggtggacctcgaacagctgcgccaggtcggcgccggggggctccggggggcggcgggcccccagcgtctcgagcacggacggcgacgacgggctcgcgggcccgtcatcgccgccgccctgcccggactgcgggggggtatccggtgcgggagggaccgtggcggctatgggcgtcggggaggaggcggggacctcggcggcgacgggggccttcttcttgggcgcggacttcttcttggccttggcgggcggggccttgggggcgggcctctcgcccgaggtcagatcctccacgctggacggtggggtccaggtgggccggcggcgcttgggcaagccggtagaatagcgcgcccggtggcgacccaccggcactgcccccacctccaggacccgcaggtcctcggcttcttcggccgcgtccccggcgggtgtctgcgggggcggggcggcgtgcggtggacccgaggccgcggcgtccggggccgagggcttcgcgggcggggtcccctccagggctgctgcccacacatcatcgggggggcggtttgggtgccccgcctgcggtgtgtcgggtgggcccgaggccccccggggggcctcggggggccggtcggccccaggggtctggacgtgggtgggcgcggggagcgcggggacgaccgggcccgagccttctccgtcccccctggggaccacaccgacaaagagcgccccgagccccccgatctcgccccgcagggggtgggtgatggccacgcgccgctcgacgaacggttcgtcctgcaggtaagtctcgctggccccgtagaggtgcagggccgcggcggtcaggtccgccggcgccacggcccccgggccggagggcacaaaaaacaccatggcgcccgcccaccgcaccttggggcggtcgtgggcgtaatacgtcaggtacgggtacacgtcgcccgcccgcaccttggcgataaacgcgggcgttcccgcgggcaggccgtgcgggtcaaacagataggccgtgtcgccgtcccggtagagccccatgcccagggggccgatggtcaggagcgtgtaggacagcggccgcatggcccaggggccggcgaagaacgtgtgcgcggggcattgcgtctccagcagccccgccgtgggctccccgaagaagcccacctcgccgtacacccgcgaaaacacgcaacgcaggccgccgcgcgccgccgggtactccaggaagttggggagctcgataatggaacacatgcgcggcggcccggagcccgcggccgcgcgcgtccactcgcccccctccaccagacatccctcgatggcctccgcggacagcacgtcgcggggccccacgtcgaaaagaagactgagaaacgacagggacgagcgcatgcacgataccgacccccccggctccagatcggtcgcgaactggttccgaacaccggtgaccacgatatcgcgatccccctggcgcttcatcgtggggtgaggtagcgcggccggaatcatgtgtgccgcgcccgccacgagcggggcctgtttatgggccgggcgtcccgatgagtactgttgtttccgccgcccgaacccccccgcccatcaaccgcctgttcgtccccctaaccacacacccggtatcgcgtgtgtgtggtttcccgggaagccacatcccaccccatgaagttttgccctttttttccgtcccgcactacgccacctttccacccccccccccccaaaaaaaacaacaaccaactcccagatggatgggtgcgataataaagctttattattgtttaaccaaaggcgagtcctacgggtgtaccggtggtgtctcctgcggcgtcatctcgtcgtcctccacgggggtgttgggccaagggaccgtctcgcggcccgccgggcgcgtcgacggcgcgcgggcctgcgtgtcctgtgggccgggtgtcgtgggttcgggggtgctaccgccggcatcttgggcctccaggtccccgggggcccccgggccggcggaaggccgaaacgccgaggcgcgaaacacgccgtcggtgacctgcaggagctcgtttattaatagccagtccatgctcagcgtagcggccagcccctggggagacaggtccacggagtccggaaccaccgtcggctgacccaggggccccaggctgtagtccccccaggcccccaggtcatgacggttcgtgagcacgacgaggtctgcggccgggctggggggcgcgtcctcggtcgcgtgggccatcacctcctgaatggctgcggtgcgctgatcggccgagctggcgaagggcgccacgaccagcgcgcgctccgtctgcaggcccttccacgtgtcgtggagttcctgaacgaactcggccacccgctcggggcccgtggccgcgcgcgcggcctgatagccggccgagaggcgccgccagcgcgccaggaactgactcatgtaacagaacccggggacctggtcccccgacatcaactttgacgccctggcgtggatgcccgacacgatggccaggaacccgtggatttcccgccgcacgacggccagcacgttaccctcgtgcgagacctgggccgccagctcgtcgcataccccgaggtgcgccgtcgtctcggtgacaacggaccgcagccccgcgagggacgcgaccagcgcgcgcttggcgtcgtgatacatgccgcagtactggctcaccgcgtcgcccatggcctcggggcgccagggccccaggcgctcgtgggcgtctgcgaccacggcgtacaggcggtgcccgtcgctctcgaaccggcactcaaagaaggcggcgagcgtgcgcatgtgcagccgcagcagcacgatcgcgtcctccagctggcggaccagggggtcggcgcgctcggcgagctcctgcagcaccccccgggccgccagggcgtacatgctgatcagcagcaggctgctgcccacctcgggaggctgggggggaggcagctggaccgcgggccgcagctgctcgacggcccccctggcgatcacgtacagctcgcgcagcagctgctcgatgttgtcggccatctgcatcgtgggcccgacgccggcccgggtggccggttcgaggagggtgatcagcgcgcccaattttgtgcggtgcccctcgacggtggggagatagcccaggccgaagtcgcgcgcccaggccagcacccgcagggcaaactcgatggggcggggcaggtaggcagcgttgcacgtggccctcagcgcgtccccgaccaccagggccagcacgtaagggacgaaccccgggtcggcgaggacgttggggtggatgccctccagggccgggaagcggatcttggtggccgcggccaggtgaaccgagggggcgtggctaggcggcccgacggggagcagcgcggacagcggcgtggccggggtggtgggggtcaggtcccagtgggtctggccgtacacgtcgagccagatgagcgccgtctcgcgcaggaggctgggctggccggcgctgaagcggcgctcggccgtctcaaactcccccacgagcgtgcgccgcaggctcgccaggtgttccgtcggcacggccgggcccatgatgcgcgccagcgtctggctgaggacgccgcccgacaggccgaccgcctcacagagccgcccgtgcgcgtgctcgctggcgccctggatccgccggaacgttttcacgtagccggcgtagtgcccgtactcccgcgcgagcccgaacacgttcgcccccgcaagggcaatgcacccaaagagctgctggatctcgctgagcccgtggccggggggcgtccgcgcgggcacccccgccaccaaaaacccctccagggccgatatgtactgggtgcagtgcgcgggcgtgaaccccgcgtcgataagcgtgttgatcaccacggagggcgagttgctgttctggaccaaagcccacgtctgctgcagcagcgcgaggagccgttgctgggccccggcggagggcggctcccctagctgcagcaggccggtgacggccggacggaagatggccagcgccgacgcactcagaaacggcacgtcggggtcgaagacggccgcgtccgtccgcacgcgcgccatcagcgtccccgggggcgcgcacgccgaccgcgggctgacgcggcttagggcggtcgacacgcgcacctcctcgcgactgcgaaccattttggtggcctcgaggggcgggatcatgatagccgggtcgatctcccgcaccgtgtgctgaaactgggccagcagcggcggcgggaccaccgcgccccgatcgggggtcgtcaggtactcgtccaccagcgccagcgtaaacagggcccgcgtgaggggggtcagggcggcgtcgtcgatgcgctgtaggtgcgccgagaacagcgtcacccaattgctgaccagggccaagaaccggagaccctcttgcacgatcggggacgggaagagcaggctgtacgccggggtggtcaggttggcgccgggttgccccaggggaaccggggacatcttaagcgacatctccccgagggcctccagggaggtccgcgggttcatggccaggcagctctgggtgacggtccgccagcggtcgatccactccacggcacactggcggacgcgcaccggccccagggccgccgtggtgcgcagcccggcggcctccagcgcgtgggtcgtgtcggagccggtgatcgccaggaccgtgtccttgatgacgtccatctcccggaaggccgcctcgggggtctcggggagcgccaccgccatgcggtgcaccagcagcccggggaggttctcggccaagagcgccgtctccggaagcccgtgggcccggtgcaaggcgcacagttgctccaggagcgggtgccagcacgcccgcgcctccgccgggccgaccgccgcgcccgacaacagaaacgccgccgtggcggcgcgcagtttggccgcggacagaaacgccggctcgtccgcgctgcccgccggctcgctcgagggggagggcggccggcggaggttggtcaggctccccaacaggacctgcaacggtccgttcgggggtggagcggacgggggggtcatgccggcgggcgccgggacctggagcgcgctgtccgacatggcgaccggcgtgcgcgctcggcgacgcggcgcggagaccgcgggcccaaacgggaatgactgccgccgccctatacggaggggctaagtatcgcccggggacccttcgaacccccgggcgtgtcgcaagtacgccgcgaaggcgcggcgtgttatacggcgcgttatgtcccggcattccgttcgtgggttcgggcccgggtgctgtcgggtgggagtgtgtgtgtgggggggggggcggcgcgacggcggcccggaccaagtgtatcgcggccgttccgtggggtggcccaacaggccctttaaacatttgcgtatgcaccggcccagccagtcggacaccggaacccaccagaggcggaagccgccttcgcccgtgagggtgcgtgtgttttctggtggcgtgtttttcctttccgccctcctccctccccaccaccaccccccccccccactcgcccgttggcgatcggcgggaaaaccatgaaaaccaagccactcccgacagccccgatggcgtgggccgagagtgccgtggaaaccaccaccggcccgcgcgagctcgcgggccacgccccgctccggcgcgtcctgcgcccgcccatcgctcgccgcgacggcccggtgcttttgggggacagggcccccaggaggacggccagtacgatgtggctgctggggatcgaccccgcggagtcgtctccgggaacgcgcgctacccgagacgataccgagcaggccgtggacaagatcctcaggggagcccggcgcgcgggagggctgaccgtccccggcgccccccgctatcacctgacccgccaggtaaccctgacggatctctgccaaccaaacgcggagcgggccggggcgctccttttggccctgcggcaccccaccgacctcccccacctggcccgccatcgggctccgcccggccggcagaccgagcgactggccgaggcctggggccagctcctggaggtctccgccctggggtccgggcgggccgagagcggctgcgcgcgcgcgggccttgtgtcgtttaactttctggtggccgcgtgcgccgccgcctacgatgcgcgcgacgccgccgaggcggtccgggcccacatcacgaccaactacggcgggacgcgggccggggcgcggctggaccggttttccgaatgcctgcgcgccatggtccacacgcacgtgtttccccacgaggtcatgcggtttttcggggggctagtgtcgtgggtcacacaggacgagctggctagcgtcaccgccgtctgcagcggaccccaggaggccacacacaccggccacccgggcaggccctgttcggccgttaccatcccggcctgcgccttcgtggacctggacgccgagctgtgcctggggggccctggggcggcgttcctgtacttggtcttcacctaccgacagtgccgggaccaggagctctgttgcgtgtacgtggtcaagagccagctccccccgcgcggactggaggcggccctcgagcggctgttcgggcgcctccggataaccaacacgattcacggggccgaggacatgacgccccctcccccgaaccgaaacgttgactttccgctcgccgtcctggccgcgagctcgcaatccccgcggtgctcggcgagccaagtcacgaacccccagtttgtcgacaggctgtaccgctggcagccggatctgcgggggcgccctaccgcacgcacctgcacatacgccgccttcgcagagctgggtgtcatgccagacgacagcccccgctgtctgcaccgcaccgagcggtttggggcggtcggcgttccggttgtcatcctggagggcgtggtgtggcgccccggcgggtggcgggcctgcgcgtgatcgtctattgacgacggccgcccaacccgagcgaccttcccctcccactttcccccccccccctcctacacaccaactccgccctcgccgtcttggccgtgcgcggccccgtgcgtccgtctcaataaagccaggttaaatccgtgacgtggtgtgtttggcgtgtgtctctgaaatggcggaaaccgacatgcaaatgggattcatggacacgttacacccccctgactcaggagataggcatatcctccttagattgactcagcacacgatcgcaccccacccctgtgtgccggggataaaagccaacgcgggcggtctgggttaccacaacaggtgggtgcttcggggacttgacggtcgccactctcctgcgagccctcacgtctccgcccaccgattcctgttgcgttcctgtcggccggtgctgtcctgtcgacagattgttggcgactgcccgggtgattcgtcggccggtgcgtcctttcggtcgtaccgcccaccccgcctcccacgggcccgccgctgtttccgttcatcgcgtccgagccaccgtcaccttggttccaatggccaaccgccctgccgcatccgccctcgccggagcgcggtctccgtccgaacgacaggaaccccgggagcccgaggtcgccccccctggcggcgaccacgtgttttgcaggaaagtcagcggcgtgatggtgctttccagcgatccccccggccccgcggcctaccgcattagcgacagcagctttgttcaatgcggctccaactgcagtatgataatcgacggagacgtggcgcgcggtcatttgcgtgacctcgagggcgctacgtccaccggcgccttcgtcgcgatctcaaacgtcggagccggcggggatggccgaaccgccgtcgtggcgctcggcggaacctccgcgactacatccgtggggacccagacgtccggggagttcctccacgggaacccaaggacccccgaaccccaaggaccccaggctgtccccccgccccctcctcccccctttccatggggccacgagtgctgcgcccgtcgcgatgccaggggcggcgccgagaaggacgtcggggccgcggagtcatggtcagacggcccgtcgtccgactccgaaacggaggactcggactcctcggacgaggatacgggctcgggttcggagacgctgtctcgatcctcttcgatctgggccgcaggggcgactgacgacgatgacagcgactccgactcgcggtcggacgactccgtgcagcccgacgttgtcgttcgtcgcagatggagcgacggccccgcccccgtggcctttcccaagccccggcgccccggcgactcccccggaaaccccggcctgggcgccggcaccgggccgggctccgcgacggacccgcgcgcgtcggccgactccgattccgcggcccacgccgccgcaccccaggcggacgtggcgccggttctggacagccagcccactgtgggaacggaccccggctacccagtccccctagaactcacgcccgagaacgcggaggcggtggcgcggtttctgggggacgccgtcgaccgcgagcccgcgctcatgctggagtacttctgtcggtgcgcccgcgaggagagcaagcgcgtgcccccacgaaccttcggcagcgccccccgcctcacggaggacgactttgggctcctgaactacgcgctcgctgagatgcgacgcctgtgcctggaccttcccccggtcccccccaacgcatacacgccctatcatctgagggagtatgcgacgcggctggttaacgggttcaaacccctggtgcggcggtccgcccgcctgtatcgcatcctggggattctggttcacctgcgcatccgtacccgggaggcctcctttgaggaatggatgcgctccaaggaggtggacctggacttcgggctgacggaaaggcttcgcgaacacgaggcccagctaatgatcctggcccaggccctgaacccctacgactgtctgatccacagcaccccgaacacgctcgtcgagcgggggctgcagtcggcgctgaagtacgaagagttttacctcaagcgctttggcgggcactacatggagtccgtcttccagatgtacacccgcatcgccgggttcctggcgtgccgggcgacccgcggcatgcgccacatcgccctggggcgacaggggtcgtggtgggaaatgttcaagttctttttccaccgcctctacgaccaccagatcgtgccgtccacccccgccatgctgaacctcggaacccgcaactactacacgtccagctgctacctggtaaacccccaggccaccactaaccaggccaccctccgggccatcaccggcaacgtgagcgccatcctcgcccgcaacgggggcatcgggctgtgcatgcaggcgttcaacgacgccagccccggcaccgccagcatcatgccggccctgaaggtcctcgactccctggtggcggcgcacaacaaacagagcacgcgccccactggggcgtgcgtgtacctggaaccctggcacagcgacgttcgggccgtgctcagaatgaagggcgtccttgccggcgaggaggcccagcgctgcgacaacatcttcagcgccctctggatgccggacctgttcttcaagcgcctgatccgccacctcgacggcgagaaaaacgtcacctggtccctgttcgaccgggacaccagcatgtcgctcgccgactttcacggcgaggagttcgagaagctgtacgagcacctcgaggccatggggttcggcgaaacgatccccatccaggacctggcgtacgccatcgtgcgcagcgcggccaccaccggaagccccttcatcatgtttaaggacgcggtaaaccgccactacatctacgacacgcaaggggcggccattgccggctccaacctctgcacggagatcgtccacccgtcctccaaacgctccagcggggtctgcaacctgggcagcgtgaatctggcccgatgcgtctcccggcggacgttcgattttggcatgctccgcgacgccgtgcaggcgtgcgtgctaatggttaatatcatgatagacagcacgctgcagccgacgccccagtgcgcccgcggccacgacaacctgcggtccatgggcattggcatgcagggcctgcacacggcgtgcctgaagatgggcctggatctggagtcggccgagttccgggacctgaacacacacatcgccgaggtgatgctgctcgcggccatgaagaccagtaacgcgctgtgcgttcgcggggcgcgtcccttcagccactttaagcgcagcatgtaccgggccggccgctttcactgggagcgcttttcgaacgccagcccgcggtacgagggcgagtgggagatgctacgccagagcatgatgaaacacggcctgcgcaacagccagttcatcgcgctcatgcccaccgccgcctcggcccagatctcggacgtcagcgagggctttgcccccctgttcaccaacctgttcagcaaggtgaccagggacggcgagacgctgcgccccaacacgctcttgctgaaggaactcgagcgcacgttcggcgggaagcggctcctggacgcgatggacgggctcgaggccaagcagtggtctgtggcccaggccctgccttgcctggaccccacccaccccctccggcggttcaagacggccttcgactacgaccaggaactgctgatcgacctgtgtgcagaccgcgccccctatgttgatcacagccaatccatgactctgtatgtcacagagaaggcggacgggacgctccccgcctccaccctggtccgccttctcgtccacgcatataagcgcggcctgaagacggggatgtactactgcaaggttcgcaaggcgaccaacagcggggtgttcgccggcgacgacaacatcgtctgcacaagctgcgcgctgtaagcaacagcgctccgatcggggtcaggcgtcgctctcggtcccgcatatcgccatggatcccgccgtctcccccgcgagcaccgaccccctagatacccacgcgtcgggggccggggcggccccgattccggtgtgccccacccccgagcggtacttctacacctcccagtgccccgacatcaaccaccttcgctccctcagcatcctgaaccgctggctggagaccgagctcgtgttcgtgggggacgaggaggacgtctccaagctctccgagggcgagctcggcttctaccgctttctgtttgccttcctgtcggccgcggacgacctggtgacggaaaacctgggcggcctctccggcctcttcgaacagaaggacattcttcactactacgtggagcaggaatgcatcgaggtcgtccactcgcgcgtctacaacatcatccagctggtgctctttcacaacaacgaccaggcgcgccgcgcctatgtggcccgcaccatcaaccacccggccattcgcgtcaaggtggactggctggaggcgcgggtgcgggaatgcgactcgatcccggagaagttcatcctcatgatcctcatcgagggcgtcttttttgccgcctcgttcgccgccatcgcgtacctgcgcaccaacaacctcctgcgggtcacctgccagtcgaacgacctcatcagccgcgacgaggccgtgcatacgacagcctcgtgctacatctacaacaactacctcgggggccacaccaagcccgaggcggcgcgcgtgtaccggctgtttcgggaggcggtggatatcgagatcgggttcatccgatcccaggccccgacggacagctctatcctgagtccgggggccctggcggccatcgagaactacgtgcgattcagcgcggatcgcctgctgggcctgatccatatgcagcccctgtattccgcccccgcccccgacgccagctttcccctcagcctcatgtccaccgacaaacacaccaacttcttcgagtgccgcagcacctcgtacgccggggccgtcgtcaacgatctgtgagggtctgggcgcccttgtagcgatgtctaaccgaaataaaggggtcgaaacggactgttgggtctccggtgtgattattacgcaggggagggggtggcggctggggaaagggaaggaacgcccgaaaccagagaaaaggaccaaaagggaaacgcgtccaaccgataaatcaagcgccgaccagaaccccgagatgcataataacaaacgattttattactcttattattaacaggtcgggcatcgggaggggatgggggcgcgcgtttcctccgttccggctactcgtcccagaatttagccaggacgtccttgtaaaacgcgggcgggggcgcgtgggcccacagctgcgccagaaaccggtcggcgatgtccggggcggtgatatgccgagtcacgatggagcgcgctaaatcttcgtcgcggaggtcctgatagatgggcagtctttttaaaagagtccatggtccccgctccttggggctgataagcgatatgacgtacttgacgtatctgtgctccaccagctcggcgatggtcatcggatcgggcagccagtccagggcctccggggcgtcgtggatgacgtggcggcgacgtccggcgacatagccgcggtgttccgcgacccgctgcgcgttggggacctgcacgagctcgggcggggtgagtatctccgaggaggacgaccgggcgccgtcgcgcggcccaccggcgacgtccgggggctggaggggggggtcttcttcgtagtcgtcctcgcccgcgatctgttgggccagaatttcggtccacgagatgcgcgtctcgaggccgaccggggccgcggtcagcgtaggcatgctctccagggagcgcgagttggcgcgctcccgccgggcggcccggcgggcctgggatcggctcggggcggtccagtgacactcgcgcagcacgtcctcgacggacgcgtaggtgttattggggtgcaggtctgtgtggcagcggacgaacagcgccaggaactgcgggtaactcatcttgaagtactgcagcaggtcgcggcagtgaatcgtcggaatgtagccggtgctgatgtccaacacgatatcgcagcccatcagcaggagatcggtatccgtggtatgcacgtacgcgaccgtgttggtatgatagaggttcgcgcaggcgtcgtcggcctccagctgacccgagttgatgtaggcgtaccccagcgcccgcagaacgcggatacagaacaggtgagccaggcgcagggccggcttcgagggcgcgcccaagggggccgccgggcctgggccggcggcccgcgttccccggtcccccggggcgaaggcgtgcccgcggcggcgcatgttggaaaaggcgaaactgggcctggagtcggtgatgggggaaggcggcggcgaggcgtctacgtcactggcctcctcgtccgtgcggcactgggccgtcgtgcgggccaggatcgccttggccccgaacacaaccggctcggtacactcgaccccgcgatcggtcacgaagatggggaacagggacttttgggtaaacacccgtaacatactacagagacagtgtagcgtgattgcctcgcggtcgtaacttgggtagcggcgctgatatttaaccaccagggtatacatgacattccacaggtccacggcgatgggggtaaagtagccctccggggcccggaggccccggcgcttcaccagatggtgagtctgggcaaacttcatcatgccaaacagacccattccggcacgattgtaggtgcggataggtctctctacagagctgtataggtgtgacggtccgggacacccaagcccgccgcccctgtgtacagtggctgcggcgacgaccccgctccaacaagacgctatcccgggaaaggcacgctctttataattcttttttatttcccatctacgtgcggattggtgcaaccgccggcgcgcgccggtgcaggccgaccatctctctcttcccccccctcccccgagccctcaaagagggtgtggcctaactagcggaaggcgtatttaaccagactagggcggcgggtccgccgtagtccttggctcgggtagccactgctctgtggctcgggtcccccggcccccctaacccccatccggtccgcgtcatccgccccctccgcctgcgacacaaacggccgcgcctccgggcccggtgacacgacgcgcctcgtctctgcggattgtcccgggagcgtcgcggcatggctcatcttcccggcggtgcggccgccgccaccctttcggaggacgcgatcccgtcgccgcgcgagcggacggaagactggccgccctgccagatagtgctgcagggcgccgagctgaacgggatcctgcaggcctttgcgccgcttcgcacgagccttttggactcgctcctggtcgtgggcgaccgaggcatccttgtacataacgcgattttcggcgagcaggtgtttctgcccctcgaccattcgcagttcagtcgctatcgatggggcggacccaccgcggcgttcctgtctctcgtggaccagaagcgatccctgctgagcgtgtttcgcgccaaccagtaccctgacctgcggcgggtggagctgacggtcacgggccaggccccgtttcgcacgctggtgcagcgcatatggacgaccgcgtccgacggagaggccgtggagcttgccagcgagacgctcatgaaacgcgagttgacgagcttcgcggtactactcccccagggcgaccccgacgtccagctgcgcctcacgaagccccagctcacgaaggtggtgaacgccgtcggggacgagaccgccaaacccaccacgttcgagctcggccccaacggcaagttttccgtgtttaacgcgcgcacctgcgtcacctttgccgcccgcgaggagggcgcgtcgtccagcaccagcgcccaggtccagattctgaccagcgcgctgaagaaggcgggccaggcggccgccaacgccaagacggtctacggggaaaacacacaccgcacattctcggtggtcgtcgacgactgcagcatgcgggcggtcctccggcggctccaggtcggcggggggaccctcaagttcttcctcacggccgacgtccccagcgtgtgtgtcaccgccaccggccccaacgcggtgtcggcggtgtttcttttaaaaccccagcgggtctgcctgaactggctcggccggagcccgggttcctcgaccgggagcttggcgtcccaggactctcgggccggcccgaccgacagccaggactcctcctccgagccggacgcgggcgaccgcggcgccccagaagaagaaggcctcgagggccaggcccgggtcccgcccgcgttcccggaaccgccggggaccaagcggaggcacgccggggccgaagttgtccccgcggacgacgccaccaagcgcccgaagacgggcgtgcccgccgcccccacgcgagccgagtcgccccccctctccgcgagatacggacccgaggcggcggagggtggtggggacggcggccgctacgcgtgctactttcgcgacctccagaccggcgacgcgagccccagccccctctccgccttccggggtccccaaagacccccatacggctttgggttgccctgacggcgacgggtggtggccgaacgcctcaccgcgcccgggcacgcggggtgcgttgtgttaaaaaaataaataaatggggtagtgtgttccccccccccctccaaccaatatggctgtcgtgtgtggttccgggttgcgcctccgtcctttccaccccccttccccctccttttttgttttgcgtgcgcttataagagcgggcccggggcccttcgcagcttcaccgagagcgccgtcgggccccgggtgcgggatgtgtcgcggggacagccccggggtcgcgggcgggagcggcgaacactgcctcggaggggatgatggggacgacgggcgcccccgcctcgcctgcgtgggtgccatcgctcgggggttcgcgcatctctggctccaggccaccacgctgggcttcgtggggtctgtcgttctgtcgcgcggcccgtatgcggacgccatgtcgggggcgttcgtgatcgggagcaccggcctggggttcctccgcgccccccccgcgttcgcccggccgccgacgcgtgtgtgcgcgtggctgaggctggtcggcgggggagcggccgtggccctgtggagcctcggggaggccggcgcgcctccgggggttccgggcccggcgacccagtgcctggcgctcggggccgcctacgcggcgctgctggtgctggccgacgacgtccatccccttttcctcctcgccccgcggcccctgtttgtcggcaccctgggggttgtcgtcggcgggctgacgataggcggcagtgcgcgctactggtggatcgacccccgcgccgccgcggccctgacggcggcggtggtggcgggcctcgggacaaccgccgccggggacagcttttccaaggcctgtccccgccaccgccgcttttgcgtcgtctccgcggtcgagtctcccccgccccgatacgccccggaggacgccgagcggccaacagaccacggacccctgttaccgtcgacgcaccaccagcgatctccgcgggtctgcggcgacggggccgcacggcccgaaaacatctgggttcccgtggtgacctttgcgggcgcgctcgcgctggccgcctgcgccgcgcgagggtctgacgcggctccgtcaggcccggtcctgccgctgtggccccaggtgtttgtcgggggccacgcggcggcgggcctgacggagctgtgtcagaccctcgcgccccgggacctcacggacccgctgctgtttgcgtacgtcggattccaggtcgtgaaccacgggctgatgtttgtggtccccgacatcgccgtatacgcgatgctggggggcgccgtgtggatctcgctgacgcaggtgcttgggctccggcgccgccttcacaaggacccagacgccgggccctgggcggccgcgaccctgcggggcctctttttctccgtctacgcattggggtttgcggcgggggtgctggtgcggccgcggatggcggcgagccggcggtcggggtgatcgccatttcaaataaaaggcacgagttccccgaataccaccggcgtgtgatgatttcgccctaccgctccgatccccggggggaggggggaaggaaatgggggcgggggtgccgtggacgggtataaaggccaggggggcaggcgggcccatcactgttagggtgttaggttgggaggtggcacaaaaagcgacacacccgtgttgtagttgtccgcgggaggcggtggtttccggcaaccctcctcgctgcgccgggcgcgcccaccggtccttcgcgggggccggggctcttctggtcatggcccttggacgggtgggcctagccgtgggcctgtggggcctgctgtgggtgggtgtggtcgtggtgctggccaatgcctcccccggacgcacgataacggtgggcccgcgggggaacgcgagcaatgccgccccctccgcgtccccgcggaacgcatccgccccccgaaccacacccacgcccccccaaccccgcaaggcgacgaaaagtaaggcctcccccgccaaaccggccccgccccccaagaccgggcccccgaagacatcctcggagcccgtgcgatgcaaccgccacgacccgctggcccggtacggctcgcgggtgcaaatccgatgccggtttcccaactccacccgcacggagttccgcctccagatctggcgttatgccacggcgacggacgccgagatcggaacggcgcctagcttagaggaggtgatggtaaacgtgtcggccccgcccgggggccaactggtgtatgacagcgcccccaaccgaacggacccgcacgtgatctgggcggagggcgccggcccgggcgccagcccgcggctgtactcggtcgtcgggccgctgggtcggcagcggctcatcatcgaagagctgaccctggagacccagggcatgtactactgggtgtggggccggacggaccgcccgtccgcgtacgggacctgggtgcgcgttcgcgtgttccgccctccgtcgctgaccatccacccccacgcggtgctggagggccagccgtttaaggcgacgtgcacggccgccacctactacccgggcaaccgcgcggagttcgtctggttcgaggacggtcgccgggtgttcgatccggcccagatacacacgcagacgcaggagaaccccgacggcttttccaccgtctccaccgtgacctccgcggccgtcggcggccagggccccccgcgcaccttcacctgccagctgacgtggcaccgcgactccgtgtcgttctctcggcgcaacgccagcggcacggcatcggtgctgccgcggccaaccatcaccatggagtttacgggcgaccatgcggtctgcacggccggctgtgtgcccgagggggtgacgtttgcctggttcctgggggacgactcctcgccggcggagaaggtggccgtcgcgtcccagacatcgtgcgggcgccccggcaccgccacgatccgctccaccctgccggtctcgtacgagcagaccgagtacatctgccggctggcgggatacccggacggaattccggtcctagagcaccacggcagtcaccagcccccgccgcgggaccccaccgagcggcaggtgatccgggcggtggagggggcggggatcggagtggctgtccttgtcgcggtggttctggccgggaccgcggtagtgtacctcacccacgcctcctcggtgcgctatcgtcggctgcggtaactccggggccgggcccggccgccggttgtcttcttttccaccccttccgtcccccgtacccaccacaccccaccccaccccccgccgtcccccgggcgttataagccgccgcactcgcttttcccaccggaaaatcctcggcccgatccgaacggcgcacgccgcgtgggctccaaacgcctccggaagagagcgccccgccccgatattcaagcccgcggtggtgctatggctttccgtgcttcgggacccgcctaccagcccctcgcccccgcggcctccccggcgcgggctcgtgttccggccgtggcctggatcggcgtcggagcgatcgtcggggcctttgcgctcgtcgccgcgttggttctcgtaccccctcggtcctcgtggggactctcgccgtgcgacagcggctggcaggaattcaacgcgggatgcgtcgcgtgggaccccacccccgtcgagcacgagcaggcggtcggcggctgcagcgcgccggccacccttatcccccgtgcggccgccaagcacctggccgctctgacacgcgtccaggcggagagatcgtcgggttactggtgggtgaacggagacggcatccggacctgtctgagactcgtcgacagcgtcagtggcatcgacgagttttgcgaggagctcgcgatccgcatatgctactacccacgaagccccggcgggtttgtccgcttcgtaacttcgatacgtaacgccctggggttgccgtgaggcgcgcgtccgacggtcccgcttctcgcctctcttcttccccctccccaccccacccaccgaccaacgacggcgtttggccaataccctccttttttctttttctcttcccccccccaaaaaacaataaacagctaattgcgtacgacaaaccatgcggaactcgctgttttttttttcctctgtttgttactttttattgaaaacagacatacggggaaaggggccggaaaccgagacggtggggccggcggtcgcatttttttaatggctctggtgtcggccgcgtttgagcttcgtcaacagggcgctgagggcggcgacgttcgtcgggccgtcgttggccagcgcgttggtccgggggcgggcgggcatgggcgacaggcttagtcccgggtccggggcgcgtgtggcccccggaggggagaagagggcagacccgccccagtcgtacaggggattttccgcctcgatgtacggggagtccggggcgtctcccggcggggccgccccgccggcgtcttgccggcgaaggcagatgttttcgtatacccgaacccaggggatctcctcgtagacgcgccccccatcctcgcccaccgactcgtaaatggaatctgcgtcctcggagggggcgcggggggcgtggctttcggccggccaggcggcggcggtggtgtcggcggcgggggtggcgccaagcccgacgcccgcgggcatggcggcgtcatcgtcgggcagcagatacgtgttttccatctggtccggttcggcctccgcgtctggcccccaggtccgcaccgcgtcgtaaaccccggcggcctcgcgctgagccgcgagcgggcgcgccgcggctgccggccgctgctcggggggcgcggggttgcggggcgggaggcgcgggggcgccccggccatatgcgtgtaatacgtggccggccggccggcgcagggctcgggaccccggtcggccgcgtcgacgtgcgggggctcggggaggtcctcgcggtggcgcctgaacctccgaggggccgcgggggtcgagtgggggcgagcccgggggagcggcgggggtgcgttatcgcgccgggtccgttgtatcttgtcccggcagctcccgccgaccgcgccgcggccccccggtgggccggacgccgcgaggcgcaggatggactcgtagtggggcgacggggttccgctccgaagcaggtccggggccagggcggccccgaaccaggacttgatgctgagttccatccgggcccagctcggggcggtcatcgtggggaacaggggggcggcggtcctgcagaagcgctcctggctgtccaccgccgcccgtaggtactcgttgttcaggctgtcggaggcccagacgacatacccggtaagcgtcgcgttaattatatactgggcgtggtggtggactatggatagaacctcgacggtcgagacgatggcgtccacgatcccgtacgtgccgccgctgcgcttgccggtctcccacaggtgggccaggcgcgtcaggtggcccaggacgtcgctgaccgccgcccgcagggccatgcactgcatcgagcccgtggtgccgctgggcccgcggtccaggtggcgcgcaaacgtctccgcgggcgcctccagactcccgctgagcgccacgaaccggcgatcggcggggcccaggcggcgacacacgtacttgtccgccgtccacagcatccacgaggcccaatggtacaacacggagacgtaggccaggagctcgctcagccgcagtgcggtgtccgtgctcggccggctcgggtctgcggggcgcataaagaacatgtactgctggagcctgtgggccgcgtcgcgcaaccccgccaccgcggcggcgtacttggccgcggcggccccgctcttgaacggggcgcgcaccagcagcttcgggagcagggtgggccgcagcagcacgtgcaggctggggtcgcagtcgcccgccgggtcgtcggggatgtccaggccgctgggcacgaccgtctggaggtacttccagtactgcgctaggatggcgcggctcagctggccgcccgacagctccacctcgccgagcgcctgcttggcggccgacgcgtagtgccggatgtagtcgtagtgcgggtcgctggcgagcccgtctacgatcaggctctcggggacggtgttatggtgccgcgccgccagccggacgctgcgatcggcgccggtcagaaacgccggctgcaggtcgtcggcgcgctgccgcaggacgcccacggccgcgctgaggagcccctccggggtggggagcagacacccggcgaagatgcgccgctcggggacgcccgcgttggcgccgcggatgaggttggccggcgtcaggcaccgcgccagccgcagggagctcgcgccgcgcgcccggcgttgcatggcggagaccgttcggtcgggggccccgccggtcggaggtatgccgcgtcccgggatatagggttgctttttatggggaggcgcctatgggcgtggcgggccgcccagcccggtcgcgcgcctcccggacacgtgcgcccggagggcggcggtctcctcgtcgcccatgagcagtttccgaaactgcgccatgatgtccacgacgcggacccgcggccccagcacggactcgctattcaggggggcgggggggaaggccgccaggtcttcgagcaggaaggcggggtctgccgtcccgctcacgggcgcccggggcgccgaggacgcggggcgaaggtccacgtgttccgcggcggcgcgcacgtccgcccaaaatttggcgggggtggtccgcgcgtacaggggctgggtcgcgcggaggacgcacgcgtagcgcaggggggtgtacgtgcccacctcgggggccgtcgacccgccgtcaaacgcggccagggccacgcacgcgaccaccgtgtcggccaggcccagcagccgctgcaggatgagccccgtcgccagcacggcgcgcgcggccgccgcgtcgtccctgcgccggcgcgcgtccccgcaggccagggcgtatttcagggtaacggtcgccagggccgtgtgcagcgcgtacacggccgcgcccagcacggcgttcagcccgctggtggcgagcaggcggcgcgccgcggtgtcgcccagcgcctcgtgctcggccgccacgaccccggggctgcccaggggcagggcgcgaaacagcgcctcctgctccacgtccgcaaacgcggggtgggcggagtgcgggtgcaggcgcgcccccacgaccaccgagagccactggaccgtctgctccgccaggaccgccagcacgtccaggacgcgccccgcaaacgcggcctcccgcgggagcacgcatttgacggcgccggggttgaagcgggcgagcagagccccggtggcgatgtacgtcatgcgccccgcgtagcgggcggccacgcgacagtcgcgccccaggagcgcgcgcaccccgggccagtacagcagggaccccagcgaactgcgaaagaccgcggcgtcggggccggggtgggggggcgcggcccctcccgcgctgagcagcggcacggcggcggcccccacgggccgcaacgccgtgaggctcgcgaactgccgtcggagctcggccgccctgtcgtcgagctccgagccgcgcccctccgtgtgcaggcgcgtcccgcagacccacccgttgatcgccacccgcacgatggcgtccaccagaaagcccatcgcgcgggaggggctggtttttgcccgccgatccgtcaggtcgaggatcgcgtcgcccgtgacgtaccaggccagcgcctcgccctgctgcagcgtctggcggaaaaacacctttgggtcggccggggaggcaaagtgcatgacccccacgcgcgacagcccgaacgcgctatccggacacgggtagaacccggccggatgtcccagggccagggccgagcgcacggactcgtcccacgcggcgactcggggggtcaggcggtccagggggaatgccgcctgcagctccgggcccgacacgcggcccgcgagaatctcgaccgtcgcggaaggccgcgccccggcgccgtcatcgtgcgcgacggcggcggggtagtcgtcctcctcgtagttgagctcgtccaggaacagcggcgagggcaccacccgcgaaccgcccacccgccccaaaacgtcgcgtgggtccatcgggcccaggtagcctccccgcggggcccgcgcgatggcgctgtcccggcgtccgcgaacggactggctcctggccgtaacggacctggggcgcggaaaggacgcccggcgggggggcgccgccgcccgggcctcggacgcgcgtcgggacccggggtgaccgcgggcctcccggcgacggcgcgggggcggctcttcgctcgccatctcccccgcggcctcgacctcgctgtcgtcgtccacgttaaacaccgcccgcaggtaccccattaacccgactccaccgccctcgggctcgtcctccacgggcgagtcggcgcgatgcgcggacggggcatgggaccgggtggaggcgcgcctccggcgtacggcatgcccgcgcacggacatggtggccggaggcccgattttttacacacgccctccccgcagacggacgaggaaaggggtggtgcgagggggggaggcccaaacggggaggtggggggtagggggcggtcccagggagcggggggtaggaaccggcacgacgggaacagagaaaacgcgaccgctccaacaagggtgggggggtgggcctcgtccccacgcagacccgcgggcaaatgcgagaacgggacccgcgcgcctgcctttatacgcggaccccagcaccacgagccgttctgtgacgcgaatctacacgaccgcgggctcgtaggcgcgactaacgcccgacccaacggcacacacccccaccccgcgcgtaaccccatttctttcatggtcccgtaataaacagccaacacacgccgcgtatgatgagttgcttgccaatgtttattgctgtggttgcgaaccctctatcgcgatacagacggaggtgaggcggggcggcggtggggggggggcgcgccgcccggtcgcacatcctaccccccaaagtcgtcaatgcccatggcatcggtaaacatctgttcaaactcaaaatcgtccacgtccaaagccccatacgagacggggtcgtgggtcattcccggggagggggactccacgtcccccagcatctccaagtcgaagtcgtccagggcgtcggcgggcgtcatatccacctcctcgccgtccaggcggagttcgtctcccaggctgacgtcggtaatgggggcggtggtggacagtctgcgggggcgttgtcccgcggagagaaacgacatgcgcggcgccaccagcccggcctccgcgggagcgtcatcgtcgtccgggaggtcgagcaggccctcgattgtcgatccgtaattgtttctggtccgcccgcggctatacgcgtgctcccgcatgacggactcgccctccgaggtcgcgacgctggagtacgagtccaacttggcccggatcagcagcataaagtacccagaggagcgggcctggttgccctgcaggacgggcggggtcgtgaggggcgccccgggttcctccgccgccgcacttcgcaccagcgggaggttcaggtgctcgcgaatgtggtttagctcccgcagtcgccgggcctccacgggaactccccgcacggtgagcgatccgttgataaacatcaggggctgaaacagacacgccaactggcgccagctctccaggtcgcagcagaggccgtcgaacagatcgggccgcatcatctgctcggcgtacgcggcccataggatctcgcggctcagaaagaggtatagatgcagaaacaggacgcgcgccaggcgcgcggtctcgcggtagtacctgtccgcgatcgtggtgcgcagcatctcccgcaggtcgcggttgcggccccgcatgtgtgcctggcggtgtagctgccgaacgctggcgcgcaggtaccggtacagggccgagcaaaaatttgccaacacggtccggtagctctcctcccgcgcccgcagctcaccgcggaaaaactgcgccatggcctcgtagtacgaaggcagctcgtcgcgggtggcgggcagggtggggaacgccacgtcgccgtgggcgcgaatgtcgatcggggagcgctcggggacgtgcgcatccccccagtcgatcacgtcgctgggcagcgtcgacagaaacttgcactcccggtacatgtcggcgttggtcgggaacccagagaacaggtcctcgttccaggtatctagcatggtacacagcgcgggacccgcgctgaagcccagatcgtcgaggagacggttaaacagggccgcgggggggacgggcatgggcggcgagggcatcagctgggcctgactcagccgaccggtggcgtacagcggaggggcggctggggtgtttttgggacccccggctggcctggggggcggtggcgaaaccccgtccgcgtccgcaaacagatcgtcgaccaacaggtccatgggggcggttgggtccgggaataacgatctcgagaggcgaatgagacgtgcccgagcgcccggcggcggaggggggggagggatccgggacccgcgacagaaaaaggccgggaccctcgcgaagggaatcgccgggggtgccgtgcgtccccgaggactgacatctcgcgtccaccaccccgcatttaagtatcaccccagtgccgccccaaacctcgtgacttccccaccgctccgggcggcccgtcccccgcgcccggaagggaggcgtgtccttcctcccgcccctcccgcccctcccgcccctcccgcccctcccgcccctcccgcccctcccgcccctcccgcccctcccgcccctcccgcccctcccgcccctcccgcccctcccgcccctcccgcccctcccgcccctcccgcccctcccgcccctcccgcccctcgccacaaacgcgtgctgacagcgaagtggttaaatcgaccgtgatgctttattgtctgtcgtctgaacgcggccggggtcgctactcgagggggcggcgggggcgggaagccgagcgggcgggggcccgtgcggtcgcggcggcacgccccgcggggcggccccggacggccgcggtcgcgtcgacgtcctgcgccgcgtcgggattcaccaactcgttcgcgcgctgcaggaggttcttgccctcgcagaccgtcacgcgaatggtggtgaggtcgaggagctcgttgaggtcttcgtcggtgtgcggccgcgacatgtcccacagctgtaccgccgccagccgggcgtgcgtggccgccaggcgcccgaccgcggcgcagaagacgcgcttgttgaacccggccacccggggggtccacggcgccgtggggctcggtggggcggtgctgaagtgcagcttcttggccagtccctgggcgggtgtcttggttcttcccgaggccgtgggagcgggggcgtctaggagcacggcggagtcggcctgggcgggtcgcctgccgcgggcggggtcggtcgccggggtcgcgggggccttaggcgccccgcgcgtcattttgggggtccgcgcgggaggggcgtgcgagcgcccgccggcgcccacggggcccccggggggtggaggagcgcgcgcggggccggggccgtgagagcccgcgacggacgccgaacgacgcggtcgcgcggtatcccgggactcgtcgttgtcttcggacgacgacgagtcccggtagagggcatacccagcctcgtcataatggagaaagcgaacctcgcgcatcgggcgcgcgcgcatcgggccagcgccgcggcggaagtcgtcgcgcggactctctggatccgccggggagaccgggccatagtacagctcctcgtgggtcccgcgcggcgcttcccgcggacacgacttgacggagcggcgagaggtcatggtctatcggagacaccggggacgcccgtgcggatcacagggaaggcgtcggcgaagcaggcagagagcgtcggaaggcggcgagggagggaaagagggagaccggcggggtacgggagagcagcgagggcctgcgtaacccacgggggccgcgggagtggctccctgcgggttgcgggggagagtttataggaagtggatataaccgcaggcgacgggactaaccaatccccgggggggcaacggacagacacgccccgaacaggcccgacttccgcgaggaagcaaaggccgggggccgcccaacgacacgcccaccccttcccaacagggcgggctcaggctgacccggcggccagtgcccgctggcatatctgatacacgtgcgcgatcatacatacgcccatcgaggtcatgcctagataaaagggcaccaggacccccgggacggacaccacaccggcgctgtcgccccggcattgcgcgtccccgataacgccgcgtgcgcctaccgcgttcggcggctccccgggcacgcccgcgacgagcgcgacgaacaacagcaccacccagcggcccagtcttgcgggtttccccgtcatcgcggcgatgagtcagtgggggcccagggcgatccttgtccagacggacagcaccaaccggaatgccgatggggactggcaagcggccgtagctattcgcgggggcggagtcgttcaactgaacatggtcaacaaacgcgccgtggattttaccccggcagaatgcggggactccgaatgggccgtgggccgcgtctctctgggcctgcgaatggcaatgccgcgggacttctgcgcgattattcacgcccccgcggtatccggccccgggccccacgtgatgctcggtctcgtcgactcgggctaccgcggaaccgtcctggccgtggtcgtagccccgaacgggacgcgcgggtttgcccccggggccctccgggtcgacgtgacgtttctggacatccgggccacccccccgaccctcaccgagccgagctccctgcaccggtttccgcagttggcgccgtccccgctggcagggttacgagaagatccttggttggacggggcgctcgcgaccgccgggggggcggtggccctgccggccagacggcgcgggggatcgctggtctacgcgggcgagctaacgcaggtgaccaccgagcatggcgactgcgtgcacgaggcgcccgcctttctgccaaagcgcgaggaggacgcaggctttgacattctcatccaccgagccgtgaccgtcccggccaacggcgccacggtcatacagccgtccctccgcgtattgcgcgcggccgacggaccagaggcctgctatgtgctggggcggtcgtcgctcaatgccaggggcctcctggtcatgcctacgcgctggccctccgggcacgcctgtgcgtttgttgtatgtaacctgaccggagtcccggtgaccctacaagccgggtccaaggtcgcccagctgctcgtcgcggggaccgacgccctcccctggatcccccccgacaacatccacgaggacggcgcattccgggcctaccccagaggggttccggacgcgaccgccaccccccgagacccgccgattttggtgtttacgaacgagtttgacgcggacgcccccccaagcaagcggggggccggggggtttggctccactggcatctagaccgcgccttgcgtcgggccagatggggccccggtcaataaagagctctgtttcgcatatgccctggtgttggcggtttttttttgttgtctgtctgcccggcgctcggttgtccgttctgtcgtcgctatcacatacgcacaaacacacgggtagagtggaaccgaaaccggtcgacgtttattcaccacacagaaacacaagctaagcgagaaggaggggggcctcggtcgacgaggcctggcgtttgggggcggacgtgcgatgacgtgggtccggtgtagggtccgcggggggcacgggcccggggcgaacgggggatctgtcgccggcgtgggtgactgggaccgacgcaacctccggggcttgtgccctcgtaggcccggggggggcctcggtcgctccgagccccgcggtgcgggtccctccggccagagccgaggtggagagaccaagggcccgctccgcgatcgccacgtcctccatgaccacgtcgctctcggccatgctccgaatggcctgggagacgagcacgtccgccgacttgtccgcggcccccaccgacatgtacatctgcaggatggtggccatgcacgtgtccgccaggcggcgcatcttgtcccgatgcgccgcaacggccccgtcgatggtggagccctcgagtcccgggtggtggcgcgccagcctctcgaggttgaccatgcaggcgtggtatgtgcgggccagggcgcgcgccttcacgaggcgccgggtgtcgtccagcgactctagggcgtcgtcgagcgtgatgggggcgggcaaaagcgcattgaccaccgccagggcctcctgcagccgcggctccgcctccgagggcggagccgcggcccgaatcatctcatattgttgttcctcggggcgcgttccccaaccgcacagcaccccgagcagggacgccatcccggaacacgcgcgcggctctgcgccggctttcccccaccccaccccctccgggttcgcaggggcgatggggacggaagactgcgatcacgaagggcggtcggttgcggctcccgtggaggttacggcgctgtatgcgaccgacgggtgcgttatcacctcctcgctcgccctcctcacaaactgcctgctgggggccgagccgttgtatatattcagctacgacgcgtaccggcccgatgcgcccaatggccccacgggcgcgcccaccgaacaggagaggttcgaggggagccgggcgctctaccgggatgcgggggggctaaatggcgattcatttcgggtgaccttttgtttattggggacggaagtgggcgtgacccaccacccgaaagggcgcacccggcccatgtttgtgtgccgcttcgagcgagcggacgacgtcgccgtgctccaagacgccctgggccgcgggaccccattgctcccggcccacatcacagcaactctggacttggaggcgacgtttgcgctccacgctaacatcatcatggctctcaccgtggccatcgtccacaacgcccccgcccgcatcggcagcggcagcaccgcccccctgtatgagcccggcgaatcgatgcgctcggtcgtcgggcgcatgtccctggggcagcgcggcctcaccacgctgttcgtgcaccacgaggcgcgcgtgctggcggcgtaccgccgggcgtattatgggagcgcccagagccccttttggtttctgagcaaattcggcccggacgaaaagagcctggtgctggccgctaggtactacctactccaggctccgcgcttggggggcgccggagccacgtacgatctgcaggccgtgaaagacatctgcgcgacctacgcgatcccccacgacccacgccccgacaccctcagtgccgcgtccttgacctcgttcgccgccatcactcggttctgttgcacgagccagtactcccgcggggccgcggccgctgggtttccgctgtatgtggagcgccgcatcgccgccgacgtacgcgagaccagcgcgctggagaagttcatcgcccacgatcgcagctgcctgcgcgtgtccgaccgggaattcattacgtacatctacctggcccactttgagtgcttcagccccccgcgcctggccacgcatctccgggccgtgaccacccacgaccccagccccgcggccagcacggagcagccctcgcccctgggtcgggaggcggtggaacagttcttccggcacgtgcgcgcccagctgaacatccgcgagtacgtaaagcaaaacgtcacccccagggaaaccgccctggcgggagacgcggccgccgcctacctgcgcgcgcgcacgtatgccccggcggccctcacgcccgcccccgcgtactgcggggtcgcagactcgtccaccaaaatgatgggacgtctggcggaagcagaaaggctcctagtcccccacggctggcccgcgttcgcaccaacaacccccggggacgacgcggggggcggcactgccgccccccagacctgcggaatcgtcaagcgcctcctcaagctggccgccacggagcagcagggcacgacgcccccggcgatcgcggctctcatgcaggacgcgtcggtccaaacccccctgcccgtgtacaggattaccatgtccccgaccggccaggcgtttgccgcggcggcgcgggacgactgggcccgcgtgacgcgggacgcgcgcccgccggaagcgaccgtggtcgcggacgcggcggcggcgcccgagcccggcgcgctcggccggcggctcacgcgccgcatttgcgcccggggccccgcgctccccccgggcggcctggccgtcgggggccagatgtacgtgaaccgcaacgagatcttcaacgccgcgctggccgttacgaacatcatcctggatctggacatcgccctgaaggagcccgtcccctttccccggctccacgaggccctgggtcactttaggcgcggggcgctggcggcggttcagctgttgtttcccgcggcccgcgtagaccccgacgcctatccctgttattttttcaaaagcgcctgtcggccccgcgcgccgcccgtctgtgcgggcgacgggccctcggccggtggcgacgacggcgacggggactggttccccgacgccggtggcgacgacggcgacgaggagtgggaggaggacacggaccccatggacacgacccacggccccctcccggacgacgaggccgcgtacctcgacctgctacacgaacagataccagcggcgacgcccagcgaaccggactccgtcgtgtgttcctgcgccgacaagatcgggctgcgcgtgtgcctaccggtccccgccccgtacgttgtgcacggctccctgacgatgcgtggggtggcgagggtgatccagcaggcggtgctgttggaccgcgacttcgtggaggccgtagggagccacgtaaagaactttttgctgatcgatacgggcgtgtacgcccacggccacagcctgcgcttgccgtatttcgccaagatcggccccgacggctccgcgtgcggccggttattgcccgtcttcgtgatcccccccgcgtgcgaggacgttccggcgttcgtcgccgcgcacgccgacccgcggcgcttccactttcacgccccgcccatgttttccgcggccccgcgggagatccgcgtcctccacagcctgggcggggactatgtcagctttttcgagaagaaggcgtcgcgcaacgccctggagcactttgggcgacgcgagaccctgacggaggttctgggccgctacgatgtgcggcccgacgccggggagaccgtggaggggttcgcgtcagaactgctggggcgaatagtcgcgtgcatcgaggcccactttcccgagcacgcgcgggaatatcaggccgtgtccgttcgccgggccgtcattaaggacgactgggtcctgctgcagctgatacccggccgcggcgccctgaaccaaagcctctcgtgtctgcgcttcaagcacggcagggcaagtcgcgcgacggcccggacctttctcgcgctgagcgtcgggaccaacaaccgcctatgcgcgtccctgtgtcagcagtgctttgccactaaatgcgataacaaccgcctgcacacgctgtttaccgtcgatgcgggcacgccatgctcgcggtccgctccctccagcacctcacgaccgtcatcttcataacggcctacggcctcgtgctcgcgtggtacatcgtctttggtgccagtccgctccaccgatgtatttacgcggtgcgccccgccggggcacacaacgataccgccctcgtgtggatgaagataaaccagacgctgttgtttctgggcccgccgaccgccccccccggcggggcatggaccccccacgcccgcgtctgctacgccaatatcatcgaaggtcgggccgtgtccctcccggccatccccggcgccatgagccgccgggtcatgaacgtgcacgaggccgtaaactgcttggaggccctctgggacacccagatgcgcctggtggtcgtcggttggtttctgtatctagcgttcgtcgcccttcaccaacgacgatgcatgttcggcgtcgtgagtcccgcgcacagcatggtggccccggcgacctatcttttgaactacgccggccgcatagtgtcgagcgtgttcttgcaatacccctacacgaaaatcacccgcctcctctgcgagctatccgttcaacgccagaccctggtgcagctgttcgaggcggatccggtcaccttcttgtaccaccgcccggccgttggcgtcatcgtgggctgcgagctgctgctccgcttcgtggccctcggtctcatcgtcggcaccgctctcatctcccggggcgcctgcgcgatcacataccccctgtttctaacaatcaccacctggtgtttcgtgtccatcatcgccctgacggagctgtatttcatcctgcggcgggactcggcccccaaaaacgcggaaccagcggcccccagggggcgctccaaagggtggtcgggcgtctgcgggcgctgctgttccatcatcctctccggtatcgccgtgcgcctgtgctatatcgccgtcgtggccggggtggtgcttgtggcgcttcgctacgaacaggagattcagcggcgcctgtttgatctgtgacgtaacgcctcttccgttggaagaggcggacccagtcgcccatgcaaattaaatacacgacccgcctcgggcctacgcaccctcgcacgtcgcatgcaaattaaaatcgtgcacagagccgatccggcctcgggtctgcttgcccctcccccggcccagcacaggcaggctcgtccgacttccgcatacaccccaccctaccgcgtgcttccgcacccccgcctacgcgtgtacgcgaaggcggacccagacctgccgtatgctaattaaatacataaaacccaccctcggtgtccgattggtttctggggacggcgggggcgggggcggtgacgcccgacggggagggacaaggaggagtttcggaaagccggccccggtcgtgcgggtataagggcagccaccggcccactgggcgctgtgtgctgccgtgtgccgaccccggttgcgcgtcggtgccgctcctcgattcggacccggccactctcttccgacacgcgccccctcggaggacacccgccatcccagccccggcgacctacaacatggctaccgacattgatatgctaatcgacctaggattggacctgtccgacagcgagctcgaggaggacgctctggagcgggacgaggagggccgccgcgacgaccccgagtccgacagcagcggggagtgttcctcgtcggacgaggacatggaagacccctgcggagacggaggggcggaggccatcgacgcggcgattcccaaaggtcccccggcccgccccgaggacgccggcacccccgaagcctcgacgcctcgcccggcagcgcggcggggagccgacgatccgccacccgcgaccaccggcgtgtggtcgcgcctcgggaccaggcggtcggcttccccccgggaaccgcacggggggaaggtggcccgcatccaacccccgtcgaccaaggcaccgcatccccgaggcgggcggcgaggtcgccgccggggccggggtcgatacggccccggcggcgccgactccacaccaaacccccgccggcgcgtctccagaaacgcccacaaccaagggggtcgccaccccgcgtcggcgcggacggacggccccggcgccacccacggcgaggcgcggcgcggaggggagcagctcgacgtctccgggggcccgcggccacgaggcacgcgccaggccccccctccgctgatggcgctgtccctgacccccccgcacgcggacggccgcgccccggtcccggagcgaaaggcgccctctgccgacaccatcgaccccgccgttcgggcggttctgcgatccatatccgagcgcgcggcggtcgagcgcatcagcgaaagctttggacgcagtgccctggtcatgcaagacccctttggcgggatgccgtttcccgccgcgaacagcccctgggctcccgtgctggccacccaagcgggggggtttgacgccgagacccgtcgggtttcctgggaaaccctggtcgctcacggcccgagcctctaccgcacattcgcagccaacccgcgggccgcgtcgacagccaaggccatgcgcgactgcgtgctgcgccaggaaaatctcatcgaggccctggcgtccgcggatgagacgctggcgtggtgcaagatgtgcattcaccacaatctgccgctccgcccccaggaccctatcatcggaacggcggccgccgtgctggaaaacctcgccacgcgcctgcgcccctttctgcagtgctacctgaaggcccgaggcctgtgcgggctggacgacctgtgctcgcggcgacgcctgtcggacattaaggatattgcctcctttgtgttggtcatcctggcccgcctcgccaaccgcgtcgagcgcggcgtgtcggagatcgactacacgaccgtgggggttggggccggcgagacgatgcacttttacatcccgggggcctgcatggcgggtctcattgaaatactggacacgcaccgccaggagtgttccagtcgcgtgtgcgagctgacggccagtcacactatcgcccccttatatgtgcacggcaaatacttctactgcaactccctattttaggcaagaataaacatattgacgtcaacccaagtggttccgtgtgatgttcttggcgcgcgcggcgggtggggcggagactccggctccggggcgatgccggcgtgcgcgtgggaggagggcgatgacccaccggataaatgtggggccccggcccggcccgcttcatagcgcgtccaggaactcacggcagacgcgtattcaccgacccccccccctcgcaacatgacaacgacgcccctctcgaacctgtttttacgggccccggacatcacccacgtcgcccccccgtactgtctgaatgccacgtggcaggccgaaaacgccctgcacacgaccaaaacggaccccgcgtgcctggccgcgcggagttatttagtccgcgcctcctgctcgaccagcggccccatccactgttttttctttgcggtgtacaaggactcgcagcactcccttccgctggttaccgagctccgcaacttcgcggacctggtcaaccacccgcccgtcttgcgcgaactagaggataagcgtggggggcggctgcggtgcacgggcccattcagctgcggaaccatcaaggacgtctccggtgcatcccccgcgggggaatacacgataaacggtatcgtgtaccactgtcactgtcggtatccgttctccaaaacctgctggctcggggcatccgcggccctacgacaccttcgctctataagctcaagcggcacggccgctcgcgcggcagaacagcgacgccacaaaatcaaaatcaaaatcaaggtataacccacccccttccctccgagtccgtatgcaacctcattaataaagagtgagaaccaaccaaaacagacgcggtgtgagtttgtgggttataggaacccggtaaataccacgcgacgaaccagcatgtgtgttaacgcgacttttattcgttgtatcgcgggaggggggaagcttaccgccaaaggaaggccaagatgataacgacgaccaccgcgaccaccccaaaaaccgcatgacgacacgtcccgccacaccaccctggggcttggggcgtgtcggagctcgacgcacagcgggccgcgcgttgggcccggtacagctctcgcgaattgacaagcgggggtcgccacgtgcgcgagctttgcacgcggggttggtcggccggccccacggacccgcccggtggctcggtcggacatgcggccatgaccatggcgtaggtgggggggcgatccgaggtcgcctctgcgtaagtagggaggcccgacgggaggtcgcctcccacgccagggtgggccccaatcatagtttccggtagaaacaggggggtctccacaaacaacccccctgggccaaagctccggcgccgcgcccgtcgttcggcgcggcgcctggcgcgccgagcggcccgccaggcggcgcggcgcgagcggccacgctcacacacctcgccgtcaccggaagaagccggtgaaacaagcccaaccggcgacgtccctgcagagtacggtggaggcgagtccgtgggggtgtcgatatcaataacgacaaactggcccgcgctcgcgccggccacactctcgtatgggggcggggcgtcaatcacgctatcatctccgtcatccctgcatgcgtgggcatgcccagcccccaacgccatggtggggattcgcggctcagaagcctgcatgtcgtgtggtcggtcgtagtccaacgtgcctcccccacccaccacacagccggtccccacgccgaccactagaccgcagacgtcgcccaaccgaggtccccgtgcacagaccgcgccttttatagccccaggggttgctaattaacgcacgcatgcacacgcaatttattttgctcccccgcgtcctcccctcccccgcgtcctcccctcccccgcgtcctcccctcccccgcgtcctcccctcccccgcgtcctcccctcccccgcgtcctcccctcccccgcgtcctcccctcccccgcgtcctcccctcccccgcgtcctcccctcccctgcgcacacgtgataggtcttgggaacccgaggggcgacgcggggaaagcgcgccccctcccggccgccgcgcgcccccgcccggccgcccgcgtcgcgccggcgccccctcccggcgcttccggggcctttccttccttccccgccgcgaccccggccccgccccaccgccccgcccggcaggggggccccggcgccgcgcagaacacacagacgaacacacggtggcgatcttttctttacttcggcagaccagcgagccccggccccggcccgcgccccgccgccacacccacggcaccccccccgccgcccaccccggggtccacacaggagcgcgcgggcggcagaaacgcgggcgcggcggcggtcggggtgggagtggtggtgggggacacgaaaacacacccacgacactctccccccaccccgaccgccgccgcgccccaccggcgggatcgcggcgagacgcagccgggccccccccaccacccgcccacccacctaccccgcgcccgcagcctccggcagcacgccgaccaccgccgccaccccccaaacagccaaggcgcggtggggggcgtggtggtgaacgatgggggaaacacgggggggaggggtccggggcgaggcgggcgggcgaaggaaggggggggggtggcggcggcggtggaaagcggaaaaacggaggatggaagggcagaagatggggagtcccgatcctcctcctgcatcccctcgccttccattctccggccctccgcgagtcccgacgcccccccccccgccgcccgacgaaggagacccaagcaccgcagccggagaggccgagcggggagtgggcggccgggcgggaggatggcggagagagagagagagagagagagagagagagagagagagggggggggggggagagggaaagcaacgggaaagagaggcgcgcggaaaagcagcaagaggggggacggggcgagccgggcagagtgcggagcccccggagcccccggagcccccggagcccccggagcccccggagcccccggagcccccggagcccccggagcccccggagcccgcggccgcagccgagcagcgccgcgggctccggggccgggccgggccggcaacgccccgcgccggccgcggcggagagaacccctgtgtcattgtttacgtggccgcgggccagcagacgggccgcggcgccagcggcccacgcctcccgccgcattaggcccccgcgggcatccggcggccggccccacgcccttccattaagcacccccacgcccgcgtgccgcgcgccagccgagtgctctgcggttgcgggcgccgtgcccggagatccattaagccgccggagagcccgagccccgcccgcgtgttgttgtgggcatttctgctgcgtcatccctgtctttataaaaccgggggcgcggcagcaacgaacacaggggcccgccgccgatcgagagggactccggagaaggaaggctgctccgcgcaccggcgcgcccttctcctctcccctccctacctccccctctcttcccccttttttcccccgcctcccgtcttcttccgcgcctccgagggtccgcctctgcctcggggacccccgggcgggccggggcttggccgccgaggtgcgccccggccggaggggcccccgcacctcggcggccgccccctccggcgccgcgcgttcgcgaaaggcgcgaaaggggcccccggaggcttttttcgattcccggccgggggtcccgggtagccgcccggcgccggtcggaaggcgtcccccgcccggcggtccggcccgggcccccggcggagcgcgggggccccggggccccgggccgcgccggcggcgtttccgcgttccgtttcttctccctcccggccgccccgctcccgggcccgaccctcgccccttcccttctcctcgtcttcccccgtcccgccgcgccccttccctcttccttctctctctctctggctcgctgtctcgctctcctcacatttcccccccccgccgccgccctctccccgcgtcccaccgagacgccgcgccgcgtgagccgtccgccgggggacccaggctccggggggggggcgcgcctgcgtgtgtctcgtgtgagagagcgcgcccctcgaacgccgcgcgttctcgcaggtaggtttagggtcgtacaggtgagcttctgctgaggcggcgggagagggggggcgggcggaagagagaagagagcaggggttgggggaaaactgttcttcctccccctttcaagaaacacgaggcgggggtcccagaaagggcaggcaggtcagccgcaccgcccgcgagccaacccgtatcctttttttctaggtgtttttgtttttgtttctgtttttgttttgttattattttcgcggatccggcgtgttcggatccaccccccctttctccttcctcttcccttccacccacccccgtttccccccccccgtggtgtcgtccgggggcgtcgttcccagggggggcaggcgcgggtcgggcccatacgcccaccgcccccacgcgccggtcacccccccccaacaaccccaaaggcgcgtgcccggccacagccgtgggtgtggcgcccgtccccttcctctaccgcgtgggcgcgggcgggggggtggtggtggtagtggtggcggaaggaaacgggccggggggccggggccgctagggaaaggtaggcacgcgcgcggtgtgtcgacttgcatgccccgcaaaacgcgtcgtgtcgtgttgtgtcgtggtgggccgtgttgtggtgggccgtgtggtgtggtgtggtgttgcgaacgcgcgagccccctcgccccgatgggagtctccccgcagccagggtaaggaggggcgggcgtggcgggcaggtgtgcgggcggggtggggtgagtgcggttgcatgcctcgggtctcctcttcctgctcctcctcctttctcccagccagggtgaggaggggcgggcgtggcgggcaggtgtgcgggcggggtgggcgccggggcgggggtgggcacgggcgtaagtgcgggtgcatgcctcgggtcttctcttctccctcctcctcctccttcctcccacccgtccccgggggcagagggcgtgcatgcgttgtgattcaaccgccctcgcccccgccccactttcccccctctctatcaaagttccctggcccctggcttcgcgccggtggtgcggctgaccccccctcctccctccccgagccaggcgccctcccactcctgcccaccacccccagggtctggccggccagacgtgcgtgctctgcacgatcgggcccccctccctgtcaacacggacacactctttttttacccgccagccagcccgcccacccaccaagacagggagccagaacgcaggccgggccccggctctgttctatgataaagaccaacaggcctcgggggtgggggcggcttctcgtgcccgcccccctcctcctcctcccttttccccccccatccccggcccccctgcgcgggggagctgcatcaaaggccaacaacaaagtgtgtcaaaagcatcacaaaactttattgtaaaatttttataaatataaagttttttttttcctcaagttttcaacaaggccagaaagtccataacaaaatgctggtgtgtgttgctgttcggggccgtgtccgtccccccccccgctcccacccccacttcctgtctcctccccgtcttccccccccacctccccctgcccccgaggcgcctcggccggtggtccggtggggggcggcttcccttcgggcagcaagccgagtgttagctccccctactccccgtggcccgcgggggcgtcgccggccggcgcgggcgcgccctgctcccgagaccacgggtggcgcgaccggaggccgtggaagtccagcgcgcccaccagggtgccctggtcaaagagcatgttgcccaccggggtcatccagaggctgttccactccgacgcggggggcgtcgggtagtcggggggcctcacgcagttgcgcgcgtgctcggggagcagggtgcggcggctccacgcgggggccgcggcccgcagcaggtccgccacgttccccgtctggtccacgaggaccacgtaggcccctatgtggcccgtctccatgtccaggacgggcaggcagtcccccgtgaccgtcttgttcacgtaaggcgccagggccacgacgctcgagacccccgcgatgggcaggtagcgcgtgaggccgggcgccgggtcgcgggccccgggctcggggccgccctccgcgtggcgcgtcttcctggcacacttcctcggcccccgcggcgcagcagcgcgggggccgagggaggtttctcgtctctccccagcgccggacgcggacgcgacgctcccaccagccccgcccgcagaggaagatgcggaggaggaggaggaggaggaggaggaagaggaggaggaggaagaggaggcggcggcggcgaccgcggcctgggacgacggagacgccgacgggggcgcggcgcccgcggacgccggggcgagcggcccgtggccgcggtcgcccgagtccgagtccggggcccggcgcggcgccgccctcttggcccccaccccctggggggcgaggggcgagcgcggggcggcggaggaagaggcggaggacgaggccgcagggcccgagtccgacccgcgcctcttccgggggcgggccgccgccccctccgcggcgtggggggcggcaccgggggtgttggtgccgcgggggaccccgggtcctccctccgcgcccggccctcccgacccgcgcgcgtcggtcgcgcctgcccggcccagactctgtgcttgggtgtcggtctgagcctgggtcatgcgcgaccggggcgcgcggtgcgcgtccaccggcacggcgggcggcgcgggcccggccgcgtccgcgctcgcagacaccacgggggcggcggcggcgcggggcggactccggacgcgcggggcgacggccgcgcgggggcgcgccgcgcgccccgacgactgtggcagacctccccccccggggcccgaggacacctgcgcggaggaggaggagacaaaggagagcggcccggggcccgcggggcggcgcggagacggcgggggagagtcgctgatgactatggggggctcctgggccgcgcggggctgtctcgcggggggcgtcctgccctccgccgccgcggcgtcttcgcccacccgccgcgcctgcgcgcgccccccgccggccgcagggggaagagaggccactctcggcacgacggccgcgacggcagggccgcccccagacccagatcccacccccgcccgcaacggggcgccgccgctgctgctgctccgcggggcgccagggggcgccggtcgggtcgcggcgggctgggaggttccgcgggtcgcccccgcaccgccgcccccgcgccggggcgctcttcggggggcgggcgggacgtagtccactgcagagggagacagagacgggaacccccggttagtgcccgacccccgcccgacccccgcccgacccccgcccgacccccgcccgacccccgcccgacccccgcccgacccccgcccgacccccgcccgacccccgcccgccctcaccgtcggccaggtcatcgtcctcgtcgtccgtgccgggccacgggggggtgggcgacagggcgcggaccgtgtgtccccccagcgacagggagcgcggggccgtccgcgggttgcccgtccagataaagtccacggccgtgccggaccgcacggccgcctcggcctccacgcgggtccgggggtcgttcactatcgggatggtgctgaacgacccgctggcggtcacgcccactatcaggtacgccaccggggtgttgcacaggggacacgtgttgcgcaacggaatccaggtcttcatgcacgggatgcagaaggggtgcaggcagggaaaactctggcagcgcaggggcggggcgatctcgtccgtgcacacggcacacacgtcgcccccccctcccgcttccgcttccgcttcctcctcacccacgggcccacccccacaggatccctgcgcgtcggcgggcgtggggctgccctggcgctcggccgggggccgggccgggggcgtggccgcgtccatcaggcccgcctcgaacatctccgtgtccgtgctgcccgcctcggaggtggagtcgcggtgaaggtcgtcgtcagagattcccacctcggtctcctcctccgagtcgctgctggcgagccactgcatgtcgttgagcatcccccaggcgtgcggggcggcgggctgcttgacaaagaaacgggggggatttagagggcgcggggcgtgaggcgggacccccgtgccgtgtcccccgtgtccctccctcaccccggccccccgcccgctgctttttgttcggaagggggggagaaaggggtccgtaaccaaaggtggtctgcgtcctttggattccgacccctcgtctccccccctgtcccccgctctcgggctcctccctgcctccctcgccccccaaagggtcggggggcggcgcacggcccacgggggtcccccgaccgcttaagcgggccgggggtcggccccgtcaagcgtccccgcccccgagcccaccgcccgcgaccacccccaacccgcagccgggtggtccggggaaaagggggggcctgagacccgggggtcgccctctcaccgtgccgggggtctgccgcggcggccgctcggggccggggtccgcccgggagctcgtgccgggccggggttccatgagccggggtagggtagactcgagacggcggcccgcggtctctctcttgccgggttttagtctctgtctctccgggtctcctcctcccgccgggccgccgctccgtcgctcgcagtgccggggtgcgaatgcggcccgaccgtcacacggggctgccttatacccggcgcctatccactcccccaaaggggcggcatttacgattcccccaatagccgcgcgccccggcgggggcggagggagggaatccccccctctcggggcggccccgtccccggggaccaaccgggtgtactccaagaaccccattagcatgcgccgccccccgccgacgcagatgggagtccccccggcgccccgccggcgcggccctgagtggtgcccgcccccggggagaaattcattagcatactaggaagcccaggggaccaataggggccgatcagcccacccacccggcggcgcgcgaggctctgcgtgttctgccaagaaagtaatcagcataacccggaaccccgagggagtaattacgcggggagcgaggggccgtccgaacgtttttaattaccataagcgggaatggcggcccgttaaaagctgctaattaccgcgagcgggaacgccggcccattaaaagttgctaattaccatgagcggggatggcggccgggaccgcctattaaaagtttctaattaccataccgggaagccggcgcggggcggtcgccggggcggagtccgggcccgcgcggcggcgcgcggttggccggcgccgccccctggggcgggcggagcggcggggcggcgccgggccctcgcggatatatacgcggggctcccatcgtctcttcggagagcggcctcgcgcagaccttcggagctccggggctccgccggccgaggccgccctcgccggttcaaccctggttctttccgcctcagaagccatagagcccaccgcatccccagcatgcctgctattgtcttcccaatcctcccccttgctgtcctgccccaccccaccccccagaatagaatgacacctactcagacaatgcgatgcaatttcctcattttattaggaaaggacagtgggagtggcaccttccagggtcaaggaaggcacgggggaggggcaaacaacagatggctggcaactagaaggcacagtcgaggctgatcagcgagctctagcatttaggtgacactatagaatagggccctctagatgcatggatccaagcttattagactttagtaatctgagtatgctggtcttcgtcaaatggctcgttctcaggatcagagtctgtggtatcggagtaccgatagtggtcaggctcgttatcggacacgtcgggtgtcacgctggtggagctagaggcctctggattgctaggctcctccactgtcttggtgaagtacagcttcaccttgaagttgggagaaaaatagcgattggccttgtccttgttggccttatccaggtcattctttgtcagggtcagcaccaggtactccttatcgttgtcggccctctcgatgctacagatagaatcgatctcctggtcgcacagggagccattctccaccttctcgcttgtctcctcagggccggggatgaaaaaggtattcacccagaagtgaaacatcttatccttcttcagcatcttgttctgcttgtggaaaaactccaccttgatgtcgccgcacactggcagaggctgggggaactcaaagtacatgaacttatcctcgcgcctggtggggccagaattggagctatagatcttcaccttcagctggcacaccacaaactgtgggttgcatgtgccgccggagaacatagggattgtctcgaacatcatcttgtgaaacagcagggccactgggcggtagtccaggtggttcttcagcaggtaggagtaatagtacacgtaccgccgctggctagggattgtcacgcccttcttatctctggtccgcacctcgccgtaaaagtccagggcctcctgggccttcaggaacttgcccctgtgcagcagataggcacagatcatcacgcctgtccttcccttgcctgccttgcagtggattgctgccacgtgattatcgtcctcgctcagccactgatccaggtcctcgcaaaagggcttgatcagctccagctggggtggattgtggtcctcaaatgggtactgggccactctacagttgaacttggcggtatcatagtgccgctcggcgcacagattgtagatcttatagtggttcttgtgcttggagtccaggaacctcaccacatcgtcgatattgttcctgtacacgccctccagcctctctgctggaaatcccatggcgatgatgtttgggtagatatatgtcagatccaggtcgaagccatcctcctgatagcgcctcttattgcggctcacgatctccttgatgatggcggtcatcaggcccagggcggcctgggatgctgccaccagcttcttgccctcctctgcgaagcatgtctccttatcgtcggccttacagcacttctccacgaaggcggcaaaatcgtccatcacggccttcagctgctccttggtggccttgggcttgtgcttcaccagctccaccagggctgtctgcttcttgatctggcgctccttctcgctcagggtacagatatcggcgtggaaggtgaatgtctcggcgttaaactccttaggcacgtatgtctcgtccacctccagggcagagaagcagggccgtctattcaccagggactctgtacagcacttggtcaccctatcagacactggggtcttctcgtgcagcacgcacagctgattcagcaccacggacagatagtcctctgcgcatggcatcctctttgcctctgggtgcttacagcacttgctgccgaccttgcccaggttcctagacacctccaccagtgtaggggtggacacctggggcaccttcttggtgtatctcaccagcagggcattctgaaacttatactcgcccagctgctcgaacagctcacaattctgcttgatcaggttctgtggctcctccaccagaggcttgaactcgtcaaacacctttgcgtagcactcgtggggatcggctgctgcacagcacttctccagggttgtctcgtaggtcttggccagccgcagcagcagcaccacggaatagtctgggtggcgcctggcgtactcatacaggaacatgcccaggaacacgtccttggcctcggcatagttcttgcacacgtccttgctctccacgaagtctgctgccagagaaggcagatctgctggcatctcgtcattctccacctcggcgatgcagtgggacttctccagcaggggcttctcacagcactccttcagcttgctagagatgctgtcctggttctcacagatgtacttggccagatcggctctatcgtctgcgcactccagcaggtcgccgtgacagcactcggtgtgcacctttgtcagatcggtcaccagcttgctcacctcggcgaactcggcctttggaaatctctgagacagccttgccactgcccaggccttgaaggccctctcgccaaacttctgcaggctggcacacttcaggcgctgcttggcggagctggccttgccctcatccctcagctcgtccagcttaggcagcaggcatgctgccttgtctgctgcctgacagcactcggtaaaggcggccttatatctcttggcaaagaacagcagctcgggggcgtagaaatatgggtgtctccgggcgatctcgtacagatacttcttcaggaatgtctcctcgttatcgtgaaaggcggtgcacatcacgtccacctcagggcgcaccagccttggcagatttgggttatcgtccttgtgctgcagaaagcactcatttctctcgggctcctgcttggcacagcaatcggccatctcgccgtatgtctcccgcagtgtggccacggtgcacagcttgtcgccgaacagggtgtgcaggctcttatcacagttctcggcagactcgtcggccacgcatgtcttggcaaactcggtcacctcattcaccagcttcacgtgatcctcgaaggggcactgctgcagatactgggcaaaggcgatcagcaccagggccttgaagttctcctcgcccaggtccttaaaccggtgggccacctctgatttgtgagcatctctcctaaagacccctcgtgagtaagcggaagaaaacagaaacagcagactaataaaggtgacccacttcatggtggcggcgggaattcgatatctgcagaattccagcacactggcggccgttactagtggatccgagctcggtaccaagcttgggtctccctatagtgagtcgtattaatttcgataagccagtaagcagtgggttctctagttagccagagagctctgcttatatagacctcccaccgtacacgcctaccgcccatttgcgtcaatggggcggagttgttacgacattttggaaagtcccgttgattttggtgccaaaacaaactcccattgacgtcaatggggtggagacttggaaatccccgtgagtcaaaccgctatccacgcccattgatgtactgccaaaaccgcatcaccatggtaatagcgatgactaatacgtagatgtactgccaagtaggaaagtcccataaggtcatgtactgggcataatgccaggcgggccatttaccgtcattgacgtcaatagggggcgtacttggcatatgatacacttgatgtactgccaagtgggcagtttaccgtaaatagtccacccattgacgtcaatggaaagtccctattggcgttactatgggaacatacgtcattattgacgtcaatgggcgggggtcgttgggcggtcagccaggcgggccatttaccgtaagttatgtaacgcggaactccatatatgggctatgaactaatgaccccgtaattgattactattaataactagtcaataatcaatgtcaacgcgtatatctggcccgtacatcgggcgggcggctgggctcggcgtaggcccggagccggagcgcgtcggggcgggagagttcactcggcacgcatgcacgtgtaaccgccagtccgtgcttgcctagcgaactcacccgtcccggctggcgtgcgcagcccgggccgtgttgcgggccctcttaaggggcggcggcaggacggggaccaccccgccccgccttttttcccccggggagtcaacccccgggggggtgtttttgggggggggcgcgaaggcgggcggcggcggcgggcgggcggcagggcggccccgcgcgcccccttccccgcgcccggcgctcccggcccgcccccggacccggccgctcccccgcgggcgccgcccctccccgggggcgggcggcagggcagccccgcgcgcccccttccccgtccctcccccggaaccggccgctcccccgcgggcgccgcccctccccccgcgcgccgcgggcccgcttccccgcgtccgcccccgcgcggcttttttcccgcgcccgcccccgcgcggcaggacggggactagcaggctcactcactcggctacctcgcggtccccgcgcccgcccccccccgaagactcccgccgtcacggcgacagtcgcaccaccgctccgcccgcccccgcggcaggctgtgccacggcaggccccctcctcactcggctacctcgcggaccaccacaaactcccgagctccccgcccccctaaagacaacagtcgcaccaccgctcgccctggcagaccacacagtagcaccaagcacccgcccgcacacggttccccgccaccccctccctaccctcccctccatcccgccgagctcgcagcagcccctcccccccgcgcgccgcagggctgcgttcccgcgcccgcccccgcgcggcttaaggcgggcggcggcggcgggcgggcggcagggcggccccgcgcgcccccttccccgcgcccgccgctcccggcccgcccccggacccggccgctccccccgcgccccgccccgggggcttccccccgcccctccccccgcgcccgcggccccgagctcgcagcagcccctccctcccgcgccccgtgccttccctcccgctcctgcgggggggctcgggccacctgaccttcgtaacctgcactcaggtcagagccccagaccccccgcgggcgcgggagacgtgccgcccgaccccgacccccgcccgaccccgacccccgcccgaccccgacccccgcccgaccccgacccccgcccgaccccgacccccgcccgaccccgacccccgcccgaccccgacccccgcccgaccccgacccccgcccgaccccgacccccgcccgaccccgacccccgcccgacccccgaataaaccacacaaggcggtacgttttcgtctgtctcgttctttatttctcacacacgcgcgcggccatcgccgcgtctgtctcaaaggcgcacagacgcccgattccttccccctctccccatctcccccctcccccgctcccggaagtttccccccgtcactccccaaacagtccgtcgtcgtcgtcctccagctccgcgtccatgtccacgggctcgcgcctcggcggcgtggccagccccgcggcggtccccaccacctccacgccgccgcccgccgcggccagcaccgtccccgcgcggcccgcggccgacgcccagcgtatctgcgggggcgggcccgcgtccgcgtcgtcgcgcagcaccagcgggggcgcgtcgccgtcgggctcgagcagcgcccgcgcgcagaactcccgccgcggcccgcgcagctccgccgggccgccgcgcacggcgtcgcgccccagcgccacgtagacgggccgcagcggcgcgcccaggccccagcgcgcgcaggcgcggtgcgagtgcgcctcgtcctcgcagaagtccggcgcgccgggcgccatggcgtcgcccgcgcccgaggcggcggcccggccgtccagcgccgggagcacggcgcggcggtactcgcgcggggacatgggcaccagcgtgtcggggccgaagcgcgtgcgcacgcggtaccgcacgttggccccgcggcagaggcgcagcggcggcgcgtcggggtacaggcgcgcgtgcgcggcctccacgcgcgcgaagacccccggcccgaacacgcggccggaggccagcacggtgcggcgcaggtcccgcgccgccggccagcgcacggcgcactgcacggcgggcagcacctcgcaggccaggtaggcgtgctgccgcgagaccacgggcccgtcggcgggccagtccgcggcgcgcacggcgttgacgacgatgaggcggcggtcgcaggcgccggccagcagccccaggaactccacggcgccggcgaaggccaggtcccgcgtggacagcagcagcacgccctgcgcgcccagcgccgagacgtcgggggcgccggtccagttgcccgcccaggcggccgtggcgggcccgcagagccggttgcccagggccgccagcaggcaggacagcccgccgcgctcggcggaccactccggggggggcccgcccccggcgcggcccgcggccaggtcctcgcccggcagcggcgagtagaggatcaccacgcgcacgtcctccgggtcgggcacctggcgcatccaggccgccgcgcggcgcagcgggcccgaggcgcgcagcgggccgaaggcggcgggcgcgccgccggggggcggggcggcgcagcgcgcggccagcgaggccagcgcgcgcgggtcgaacatgagggccgggcgccacggcgcggggaagagcgggtggtccgtgagctcggccacggcccgcggggcgcagtaggcctccagggcggcggccgagggcgccggcgtgtggctgggccccggcggctggcgccgccagccgccctgcgggtcggggccctcggcgggccggcgggtcagcgccgcggggcgcggcggccgcggcggcggcgtcggcggggcggggggcgcggcccccgcgggaggggcggccgcggggcggggggcgtccgcgcggctcttcttcggggggcgcggggcgccgccgggcggcgccctggccggggcggggctcttgcgcttgcgcgcctcccgcggcgcggaggcgggcgcggcgagcgagtcggccgcggcgacggtgtcggccagcagggggcgcaggctctggttctggaagagcaggtccgcggcggcggcggcggcggagctcagcaggcgcgggctccgcggcagcgccgggcccagggccccggcgaccaggctcacggcgcgcacggcggccacggcggcctcgctgccgccggccacgcgcaggtccccgcgcaggcgcatcagcaccagcgcgtcgcgcacgaaccgcagctcgcgcagccaggcgcgcaggcggggcgcgtcggcgtgcggcggggcggccgcgcccgcgggccccgggcgcgggggcgcggcgggccgggctccggccagccccggcacggccgccaggtcgccgtcgaagccctccgccagcgcctccaggatcccgcggcaggcggccaggcactccacggccacgcggcccgcctccgcgcgccggccgccgccaccaccgccggggccgtcgtcgtcgtcgtcgtcgtcggccccggccggcgcggaggcgggcgcggcgctcaggcgccccagggcggcgagcacccccgcggcgccgtagccggcgggcaccgcgcgctcgtcggccggcgacgccgccgccgacggcaacggggcggcggcggcggcgggcttcccgcgggcgtcgtcgccgtcgtggcggttggcgtcgccgccgtcgtcgggggttcgcgccccggtcagcgccgcgttctcgcgcgccagcaggggcgcgtaggcgcggcgcaggctggtcagcaggaagcccttctgcgcgcggtcgtagcggcggctcatggccacggcggccgccacgtgcgccaggccccagccgaagcggcccgccgccatggcgtaccccaggtggggcacggcccgcgccacgctgccggagatgaaggagctgctgttgcgcgccgcgcccgagatccggaagcaggcctggtccagcgccacgtccccgggcgccacgcgcgggttctggagccaccccatcgcctccgcgtccggcgtgtacagcagccgcgtgatcagggcgtactgctgcgccgcgtcgcccagctcgggcgcccacacgggcgccggggcgcccgaggcctcgaaccgggcccgcgcctcctccgcctcgggcgccccccagaggccggggcggctgtcgcccagcccgccgtacagcacgcgccccgggggcggggggccggccccgggccacggctccccgctgacgtacccgtcgcggtagcgcgcgtagaaggcgccggaggccgcgtcggcgtccagctcgacccgccggggccgcccggccgtgaagcggcccgtggcgtcgcggccggccaccgccgcgcgggcccggcggcgctccaggcggcccgcggtcgccgcgggggtccgggccgagcccgccccggccccgggggcgggctcggccctgggcgggctcggccggggcgccgcccccggggccctcgcgggcacccccgcctcctcgtcgtccgcgccgagggtcccgcccgcggcgtggtctgcggcgctggcgggggcgcgggcggcggcgtcgtcgtcgtcgtcgtcgtcagacgaggaggcggatgcagacgaggaggaggaggcggaggaggaggcggaggacgccgacgacgaggatccggattttgatgagtcagaggcggccgagcgccggcggggggcgcgccggcggcggtggtggcggtggtggtgtcggcggggcgccgggggtcgcggcgacaggctggccatggggtccgggtacgccccgcggaccgcggacgtcgtctccggtccgcggacccagcggcccgcgtcgcggtcgtcgtcatcgtcatcgtcgtcgtcgtcgttctcctcgccataatcggcgcgcatggagggggtccgcggcggagaaggcgagcgggctgcttcttcttccgcgccgtcgcgctccggggggggcgacgggatcgtgcgaacggcctcgtccaccatcgaggccagcagggccagctgccgcggcgagacgacgccgtccgcggcaggctcgtcgacggcctccccggacgccggggccgcctcgtcggcatcggcggcggcgtcgtcgtcctcgtcttcgttctcctccggcccaccgtgccacccgaacccgggccgcgcggcggggcgacggtccgggttcggggtgggcggcggtccgtcggctggatccggagatccggggccgccggtcgtctccgccgcggcccggagacgtcccccgtcctcgtccgccatcgtgacctcggccccgcggccctgcgtcgtcgtcgtcgtcttcttcttccgctgctccgccgacatcgcctccgaccggggtgtgcggggggggtcttcttcttcttcttcaggggcggcagtggggggggggggggggtggttggcggtctctctcccccccgtgcggtgcgtgcgtgtgcctgtgtcttttcgcccctccgcgccgatcgggtagatcctggcggccgcgtcggtagccgcgctccgtgtggacgatcgccccgtcgcctggctgatatagtcctcggggcgcgcggggcggggggaaaggaggaggacgcggaggaggagcgatcgacgccgccgcgccccggctcgccggggttccgcccccaggtggaaccgcattatgcgcggccccgccccgacgcccgcgcgtccgcgtccgtggcggcggcccgttggtcgcgccgccgccggctccgcccgcgcggcatctcattagcgcccggcgcgggcggcttccgcttccgcccgccatgctaatgagacccttgtcgcgggcgggctcgctcccctgcccttccgggttcgtggtaatgagatgccggccccgcgctcccgttggcccccgccggccccaaaggggccggcgaggtcgccccgttggtccgcgggcggctccgccccaaagggggcggggccgcagggtaaaagaagtgagaacgcgaagcgttcgcacttcgtcctaatagtatatatattattagggcaaagtgcgagcgctggcgccctgcccggggcccgcgtcatcccgcgggctccgccccaaagggggcggggccgcagggtaaaagaagtgagaacgcgaagcgttcgcacttcgtcctaatagtatatatattattagggcaaagtgcgagcgctggcgccctgcccggggcccgcgtcatcacgcgggccccgccccgaggcgggcccggacggggggcgggccgttcctcgcgcacataaagggccggcgtcccggtcgccgccgcaccaggggcacaccggctgcgcggcggagaccgggacggcagcggcggcatcgcgaagggggccacagcgagacagagacgccggcggcgagcggggcaccgacgcacccggatcggatcggatacagagacgcgggcgcatcggttccttttcgttctgcctttcccttcccccccccccaccctgtacgtaccgcgaggacccatccacccactgcagccttatcgcaggtacggtgacccggggggacgggacggggggacgggacggggcggggggacggggggacggggggacgggggacggggggacgggacggggggacggggggggacggggcggggggacgggggacgggacgggggacgggacggggggacggggacgggggggacgggacgggggggacggggacggggacggggacggggggacgggacggggggacgggacgggggacggggggacggggggacgggacggggggacggggggacggggcggggggacggacggggggacggggacggggggggacgggacggggggacggggggacggggacgggggacgggacgggggacggggggacgggggacggggcggggggacgggacggggggacggggacggggggacgggacggggggacgggacggggggacgggacgggggacgggacgggggacggggggacggggcggggggacgggacggggggacgggacggggggacgggacggggggacggggggacggggggacggggcggggggacggggggacggggcggggggacggggcggggggacggggcggggggacggggggacgggacggggggacgggacggggggacgggacggggggacgggacggggggacgggacggggggacgggacggggggacgggacggggggacgggacggggggacgggacggggggacgggacggggggacgggaccccgatcccaacatccgcgctttctcgcaggccgggcgccgccttcgtggacgggacaccggtgtggtaactggcgacaaggcgtcgccactatggcagacatccccccggacccgcccgcgctcaacacgacgcctgcgaatcatgctcccccatccccgcccccgggttcacggaagcgcagacgccccgtcctccccagctcgtcggaatctgagggtaagcccgacacagaatcggaatcctcctcgaccgagtcgtccgaggatgaggcgggagacctacgcggcgggcgccgtcgctccccgcgggagctcggggggaggtattttttggatctgtcggcagaatcgaccacggggacggaatcggagggaacggggccgtcggacgacgatgatgatgatgcgtcagacggctggttggttgacacccccccccgtaaatccaagcgaccccgaatcaacctgcgattaacgagctcccccgaccggcgcgcgggtgtggttttccccgaggtgtggagaaacgacagacctatccgcgcggcgcaaccccaggccccggcccagtcttccggggatcgcgcagccgcaccgcggcgctctgctcgccaggcccagatgcggagcggagccgcctggacgcttgatctgcattacatacgccagtgcgtcaaccaactctttcggatcctgcgtgccgccccgaacccgcccggcagcgccaaccgcctgcgccacctggtgcgagactgctacctcatgggctactgccggacccgcctggggccgcgcacgtggggccgcctgctgcagatctcgggcggaacctgggacgtgcgcctgcgaaacgcaatccgggaggtcgaggcgcgttttgaacccgccgccgagcccgtgtgcgagctgccctgtctgaacgccaggcgttacggccccgagtgtgatgttggcaatctcgagaccaacggcggctcgacgagcgatgatgagatatcggatgcgacggactcggacgataccctcgcgtcccattccgacacggagggggggccctccccggccggccgggagaacccggaatccgcgtccggcggggctatcgcggctcggctggagtgtgagtttgggacgtttgactggacgtccgaggagggctcccagccctggctgtccgcggtggtcgccgataccagctccgccgaacgctctggcctacccgccccgggcgcgtgtcgcgcaacggaagccccagaacgcgaggacgggtgccgaaaaatgcgcttccccgccgcctgcccctatccctgcggccacacatttctccggccatgagcgcgggacccccagcccggtgtgtttgccaaacgaaaaataaacgccctacaagaaagcttttgtgtctgagtgtctggtttttctgggggtggaggaaggaacgacaaaaaaagaaacaaacgcgacaccgctcgtacgtgtaatggggcgcagtgttttttattagcatcggggggggttagaggttggtgattggatagcaaacgtgggatgacggaggccactcgtcgccaacggccagcgggggcccggggttctgggggtcatcgtcccccgtctgccaggagggctcatcgggaatctcgggtcgccccatgcacgtaaaacacgggcgctgcgtggggtgggtcgccggatgtgggcgggatgatgcggggcggggtttgttgtgaggagccacgagggaccgtagccagcgaagacagctgcgttcccggtcgccgggcaccaccacgccgtattggtattcgtatcggctaaggagattttccagggggtgattaggcgctgcggggaacggggtccacgacacggtccgctcgggcaaaaaccgatcgggcaggggccacggttcccccacccacgcgtcggtggtcttcatggcgatgaagcgaaaccccagccgggttttttgtgcgtactcgaaaaacggcacacacaggtccgccgccccgaccacccacaggtggtatagccggtgggggccggggcgctcttgatgcaggagccgaaaacacgcaggggcatccagaatctcgatgctttccagggggtcgtcctccgcaaacaggcccgtcgtggtgtttgggggacagcgacaggagcgggttcgcacgatcggtcgggtgaatttgggcaagtccatcagaggctcggccagcctgcgaaggttcgccgggcgaaccaccaccggggttcccagaggctcggaggccaggatccggcattgccgaagcagaaaactccacagagccgggcttgcgtcagcggaagtccgcggcagggcgtttcgttggtctaggagggtaaccacacttacaacaacaacgcccatgtcggtatattaggcccgtggtccgatcttcactcactcgcctgtctgcggacctatgcacggcgggacggcgcgcggacccggggggctgcttgctatcacacggcccgttcgcacgttcgattttttcagccttgtttggtggctaggtatcccggataatctgacgttccggatatagggggcggggggtagtgggggggtgtgtcgacaaactgccgcttcttaaaacaccggggcccgtcgctcggggtgctcgttggttggcacgcgcgacgcggcgaatggcctgtcgtaagttctgtggggtctaccgtagacccgacaagagacaggaggcgtccgtcccgccggagacaaacacggccccggccttcccggcgagcaccttttatacccccgcggaggatgcgtacctggcccccgggcccccggaaaccatccacccttcccgcccaccgtcccccggcgaggctgcgcgcctgtgtcagctgcaggagatcttggcccagatgcacagcgacgaggactaccccatcgtggacgccgcgggtgcggaggaggaagacgaggccgacgatgacgccccggatgacgtggcctacccggaggactacgcggaggggcgttttctgtccatggtttcggccgcccccctgcccggagccagcggccatcctcctgttccgggccgcgcagccccccccgacgtccggacctgcgacagcggtaaggtgggggccacggggttcaccccggaagagctcgacaccatggaccgggaggcacttcgggccatcagccgcgggtgcaagcccccttcgaccctggcaaaactggtgaccgggctgggattcgcgatccacggagcgctcatcccggggtcggaggggtgtgtctttgatagcagccacccgaactaccctcatcgggtaatcgtcaaggcggggtggtacgccagcacgagccacgaggcgcggctgctgagacgcctgaaccaccccgcgatcctacccctcctggacctgcacgtcgtttctggggtcacgtgtctggtcctccccaagtatcactgcgacctgtatacctatctgagcaagcgcccgtctccgttgggccacctacagataaccgcggtctcccggcagctcttgagcgccatcgactacgtccactgcgaaggcatcatccaccgcgatattaagaccgagaacatcttcatcaacacccccgagaacatctgtctgggggactttggggcggcgtgctttgtgcgcgggtgtcgatcgagccccttccattacgggatcgcaggcaccatcgatacaaacgcccccgaggtcctggccggggatccgtacacccaggtaatcgacatctggagcgccggcctggtgatctttgagaccgccgtccacaccgcgtccttgttctcggccccgcgcgaccccgaaaggcggccgtgcgacaaccagatcgcgcgcatcatccgacaggcccaggtacacgtcgacgagtttccgacgcacgcggaatcgcgcctcaccgcgcactaccgctcgcgggcggccgggaacaatcgtccggcgtggacccgaccggcgtggacccgctactacaagatccacacagacgtcgaatatctcatctgcaaagcccttacctttgacgcggcgctccgcccaagcgccgcggagttgctgcgcctgccgctatttcaccctaagtgaccccgctccccccggggggcgtggaggggggggctggttggatgtttttgcacaaaaagacgcggccctcgggctttggtgtttttggcaccttgccgcccggcgtcatgcacgccatcgctcccaggttgcttcttctttttgttctttctggtcttccggggacacgcggcgggtcgggtgtccccggaccaattaatccccccaacaacgatgttgttttcccgggaggttcccccgtggctcaatattgttatgcctatccccggttggacgatcccgggcccttgggttccgcggacgccgggcggcaagacctgccccggcgcgtcgtccgtcacgagcccctgggccgctcgttcctcacgggggggctggttttgctggcgccgccggtacgcggatttggcgcacccaacgcaacgtatgcggcccgtgtgacgtactaccggctcacccgcgcctgccgtcagcccatcctccttcggcagtatggagggtgtcgcggcggcgagccgccgtccccaaagacgtgcgggtcgtacacgtacacgtaccagggcggcgggcctccgacccggtacgctctcgtaaatgcttccctgctggtgccgatctgggaccgcgccgcggagacattcgagtaccaaatcgaactcggcggcgagctgcatgtgggtctgttgtgggtagaggtgggcggggagggccccggccccaccgcccccccacaggcggcgcgtgcggagggcggcccgtgcgtccccccggtccccgcgggccgcccgtggcgctcggtgcccccggtatggtattccgcccccaaccccgggtttcgtggcctgcgtttccgggagcgctgtctgcccccacagacgcccgccgcccccagcgacctaccacgcgtcgcttttgctccccagagcctgctggtggggattacgggccgcacgtttattcggatggcacgacccacgggagacgtcggggtcctgccgccccattgggcccccggggccctagatgacggtccgtatgcccccttcccaccccgcccgcggtttcgacgcgccctgcggacagaccccgagggggtcgaccccgacgttcgggccccccgaaccgggcggcgcctcatggccttgaccgaggacgcgtcctccgattcgcctacgtccgctccggagaagacgcccctccctgtgtcggccaccgccatggcgccctcagtcgacccaagcgcggaaccgaccgcccccgcaaccactactccccccgacgagatggccgcacaagccgcaacggtcgccgttacgccggaggaaacggcagtcgcctccccgcccgcgactgcatccgtggagtcgtcgccactccccgccgcggcggcaacgcccggggccgggcacacgaacaccagcagcgcctccgcagcgaaaacgccccccaccacaccagcccccacgacccccccgcccacgtctacccacgcgaccccccgccccacgaatccggggccccaaacaacccctcccggacccgcaaccccgggtccggtgggcgcctccgccgcgcccacggccgattcccccctcaccgcctcgccccccgctaccgcgccggggccctcggccgccaacgtttcggtcgccgcgaccaccgccacgcccggaacccggggcaccgcccgtacccccccaacggacccaaagacgcacccacacggacccgcggacgctccccccggctcgccagcccccccaccccccgaacatcgcggcggacccgaggagtttgagggcgccggggacggcgaaccccccgaggacaacgacagcgccaccggcctcgccttccgaactccgaaccccaacaaaccaccccccgcgcgccccgggcccatccgccccacgctcccgccaggaattcttgggccgctcgcccccaacacgcctcgcccccccgcccaagctcccgctaaggacatgccctcgggccccacaccccaacacatccccctgttctggttcctaacggcctcccctgctctagatatcctctttatcatcagcaccaccatccacacggcggcgttcgtttgtctggtcgccttggcagcacaactttggcgcggccgggcggggcgcaggcgatacgcgcacccgagcgtgcgttacgtatgtctgccacccgagcgggagtagggggtgggggtgggggtgggggggcgagaaacgatgaaggacgggaaagggaacagcgaccaaatgtcacgataagaacaataaacctgtgacgtcaatcggatatgtgagtttggttgtgttttgtgggactgggggcggggggtgggaggtatcagtgggtgacagagtcttttaaaagacgtgtcccggggccctcgagacgcgcaacttttggccacacagagaaaggcccccagacgaagtcacccgggtccccgaacaaaaacaaaaaccttgaccgccgccggggggcgtgcctgttgttttggtctcaatggatcggtatgccgttcggacctgggggattgtgggaatcctcgggtgtgctgctgttggggccgcacccaccggccccgcgtccgatacaacaaacgcgaccgcacgcctccccacgcaccccccactcatccgttccgggggctttgccgtccccctcatcgtgggggggctgtgtctcatgattctggggatggcgtgtctactcgaggtcctgcgtcgcctgggtcgcgagttggcgaggtgctgcccccacgcgggccaatttgccccatgatttttcgcctttctggccttgcccccaccccatcgccccgattgtgtgtcgggtgcccggggtacagcagctatggagcggtcggtaatataactttggttgtcgccacacgccccgtgccgggcatgggttgtgcgggaaggacgaaataatccggcgatccccaagcgtaccaactgggggggggggggggggaaaagaaactaaaaacacatcaagcccacaacccatcccacaatgggggttatggcggacccaccgcaccaccatactccgattcgaccacatatgcaaccaaatcacccccagaggggaggttccatttttacgaggaggaggagtataatagagtctttgtgtttaaaacccggggtcggtgtggtgttcggtcataagctgcattgcgaacgactagtcgccgtttttcgtgtgcatcgcgtatcacggcatggggcgtttgacctccggcgtcgggacggcggccctgctagttgtcgcggtgggactccgcgtcgtctgcgccaaatacgccttagcagacccctcgcttaagatggccgatcccaatcgatttcgcgggaagaaccttccggttttggaccagctgaccgacccccccggggtgaagcgtgtttaccacattcagccgagcctggaggacccgttccagccccccagcatcccgatcactgtgtactacgcagtgctggaacgtgcctgccgcagcgtgctcctacatgccccatcggaggccccccagatcgtgcgcggggcttcggacgaggcccgaaagcacacgtacaacctgaccatcgcctggtatcgcatgggagacaattgcgctatccccatcacggttatggaatacaccgagtgcccctacaacaagtcgttgggggtctgccccatccgaacgcagccccgctggagctactatgacagctttagcgccgtcagcgaggataacctgggattcctgatgcacgcccccgccttcgagaccgcgggtacgtacctgcggctagtgaagataaacgactggacggagatcacacaatttatcctggagcaccgggcccgcgcctcctgcaagtacgctctccccctgcgcatccccccggcagcgtgcctcacctcgaaggcctaccaacagggcgtgacggtcgacagcatcgggatgctaccccgctttatccccgaaaaccagcgcaccgtcgccctatacagcttaaaaatcgccgggtggcacggccccaagcccccgtacaccagcaccctgctgccgccggagctgtccgacaccaccaacgccacgcaacccgaactcgttccggaagaccccgaggactcggccctcttagaggatcccgccgggacggtgtcttcgcagatccccccaaactggcacatcccgtcgatccaggacgtcgcgccgcaccacgcccccgccgcccccagcaacccgggcctgatcatcggcgcgctggccggcagtaccctggcggtgctggtcatcggcggtattgcgttttgggtacgccgccgcgctcagatggcccccaagcgcctacgtctcccccacatccgggatgacgacgcgcccccctcgcaccagccattgttttactagaggagtttccccgctcccgtgtacctctgggcccgtgtgggagggtggctggggtatttgggtgggacttggactccgcataaagggagtctcgaaggagggaaactaggacagttcataggccgggagcgtggggcgcgcaccgctgtcccgacgattagccaccgcgcccacagccacctcgacccgtccgatcccggtatgcccggccgctcgctgcagggcctggcgatcctgggcctgtgggtctgcgccaccggcctggtcgtccgcggccccacggtcagtctggtctcagactcactcgtggatgccggggccgtggggccccagggcttcgtggaagaggacctgcgtgttttcggggagcttcattttgtgggggcccaggtcccccacacaaactactacgacggcatcatcgagctgtttcactaccccctggggaaccactgcccccgcgttgtacacgtggtcacactgaccgcatgcccccgccgccccgccgtggcgttcaccttgtgtcgctcgacgcaccacgcccacagccccgcctatccgaccctggagctgggtctggcgcggcagccgcttctgcgggttcgaacggcaacgcgcgactatgccggtctgtatgtcctgcgcgtatgggtcggcagcgcgacgaacgccagccggtttgttttgggggtggcgctctctgccaacgggacgtttgtgtataacggctcggactacggctcctgcgatccggcgcagcttcccttttcggccccgcgcctgggaccctcgagcgtatacacccccggagcctcccgacccacccctccacggacaacgacacccccatcctccccccgagacccgacccccgcccccggggacacagggacgcccgcgcccgcgagcggcgagagagccccgcccaattccacgcgatcggccagcgaatcgagacacaggctaaccgtagcccaggtaatccagatcgccataccggcgtccatcatcgcctttgtgtttctgggcagctgtatctgcttcatccatagatgccagcgccgatacaggcgcccccgcggccagatttacaaccccgggggcgtttcctgcgcggtcaacgaggcggccatggcccgcctcggagccgagctgcgatcccacccaaacaccccccccaaaccccgacgccgttcgtcgtcgtccacgaccatgccttccctaacgtcgatagctgaggaatcggagccaggtccagtcgtgctgctgtccgtcagtcctcggccccgcagtggcccgacggccccccaagaggtctaggtccaagcgggccgttcggcaggcccgccccaccgcccccatcgtggttatttccccccaataaaccgatgttatttgcctatatgcgtgtgttggatccctttgtgatcgttcgtcattccccggatggcatgggaggcgggtactggatgggcggggcccggggggaggaaaaagaataaagggggtagtgtcggagaggcccgccgcgcatttaaggagtcgccgccccgactctgtgtcttcgggtgacttggtgcgccgccgtcagctagtctccgatctgccccgaccgacggctcctgccacccgaacatggctcgcggggccgggttggtgttttttgttggagtttgggtcgtatcgtgcctggcggcagcacccagaacgtcctggaaacgggtaacctcgggcgaggacgtggtgttgcttccggcgcccgcggggccggaggaacgcacccgggcccacaaactactgtgggccgcggaacccctggatgcctgcggtcccctgcgcccgtcgtgggtggcgctgtggcccccccgacgggtgctcgagacggtcgtggatgcggcgtgcatgcgcgccccggaaccgctcgccatagcatacagtcccccgttccccgcgggcgacgagggactgtattcggagttggcgtggcgcgatcgcgtagccgtggtcaacgagagtctggtcatctacggggccctggagacggacagcggtctgtacaccctgtccgtggtcggcctaagcgacgaggcgcgccaagtggcgtcggtggttctggtcgtggagcccgcccctgtgccgaccccgacccccgacgactacgacgaagaagacgacgcgggcgtgagcgaacgcacgccggtcagcgttccccccccaacccccccccgtcgtccccccgtcgcccccccgacgcaccctcgtgttatccccgaggtgtcccacgtgcgcggggtaacggtccatatggagaccccggaggccattctgtttgcccccggggagacgtttgggacgaacgtctccatccacgccattgcccacgacgacggtccgtacgccatggacgtcgtctggatgcggtttgacgtgccgtcctcgtgcgccgagatgcggatctacgaagcttgtctgtatcacccgcagcttccagagtgtctatctccggccgacgcgccgtgcgccgtaagttcctgggcgtaccgcctggcggtccgcagctacgccggctgttccaggactacgcccccgccgcgatgttttgccgaggctcgcatggaaccggtcccggggttggcgtggctggcctccaccgtcaatctggaattccagcacgcctccccccagcacgccggcctctacctgtgcgtggtgtacgtggacgatcatatccacgcctggggccacatgaccatcagcaccgcggcgcagtaccggaacgcggtggtggaacagcacctcccccagcgccagcccgagcccgtcgagcccacccgcccgcacgtgagagccccccatcccgcgccctccgcgcgcggcccgctgcgcctcggggcggtgctgggggcggccctgttgctggccgccctcgggctgtccgcgtgggcgtgcatgacctgctggcgcaggcgctcctggcgggcggttaaaagccgggcctcggcgacgggccccacttacattcgcgtggcggacagcgagctgtacgcggactggagttcggacagcgagggggagcgcgacgggtccctgtggcaggaccctccggagagacccgactctccctccacaaatggatccggctttgagatcttatcaccaacggctccgtctgtatacccccatagcgaggggcgtaaatctcgccgcccgctcaccacctttggttcgggaagcccgggccgtcgtcactcccaggcctcctattcgtccgtcctctggtaaggcgtcttccgacgacgcggacgtcggcgatgaactgattgccatcgcggacgcacgcggggacccgccagagaccctgccccccggcgcgggcggcgccgcgcccgcgtgccgcagaccacctcgcggcggctcccccgcggcctttcccgtggccctccacgccgtggacgccccctcccaattcgtcacctggctcgccgtgcgctggctgcggggggcggcgggtctcggggccgtcctgtgcgggattgcgttttacgtgacgtcaatcgcccgaggcgcataaaggtccggcggccagccccgccgcagctcataaaaatcgtgagtcacggcaaccgcaccttcgcctccggccctccgccagcgcccttccgcgtccgcgatgacctcccggcccgccgaccaagactcggtgcgttccagcgcgtcggtgccgctttaccccgcggcctcgcccgtcccggcagaagcctactactcggaaagcgaagacgaggccgccaacgacttcctcgtgcgcatgggccgccagcagtcggtcctaaggcgccgacggcggcgcacgcggtgcgtcgggctggttatcgcctgtctcgtcgtggccctcctatctggagggttcggggcacttttggtgtggctgctccgctaaatgacgcctcgatgtatggcgccttcttcgcccccacccctcgccgcgacccacgtccgtatgttaattgaaataaagtggttgattgtcattacggtctactaggttgtcttttttttggggggggaaggaaaatgcagaaaagggtaagaaattctcggaatttcacccccgggggggggcaagtgcagtaacccagttcctcagtgtttgggaaatctattgaactctcccggctcctccgtgttagggaagtctcttggggaaatctattgacctctcgccccccccgggaggggggcagtgcagtaccccagttcctccgtgctggggaaatctctctgccgggtacgggctccagacgaaggacccatacatttccccatccgcaccccacatctggcgttctagagtcacgacgcatttgcccccgtccccgcagcaacacacaaagcgatttcaattttcacgattttattattaattacaccaaccaccctgtccccgggacgtggtcaggaccgggggtccgcacccaaacgcacgaaacaaatgctggcagtgtgccgaatataaccccgcgtaggaacacgtcgacgcgtgcgccaaacagcaccagaaggcgcatgccatcagcaggtcgtgcatatggcgatgtgtttggacgcagggcgcagccgcggcgataaaattcatggcggccgtccgccagggccacagcggcgaggactccctgttggcccgaagccattgggtatgaaccagctgcgcctcctgtccgaccctggctcccgccggcgggggcggtgggtcgtgggtgttgagagcacacaggcgggacacctcgatcaccgtccgaaaaaaggcccggtggtccgcgggcagcatctgcaggtgcgccagggcctgggcgttgagagggtacaactcggagccgggggactccgggggccggtccgcgcggtgccgcgagtgggcacgctttggggcccgggtgtcggacgcgggcgcgttatggatcccgacgcggggcagaacgtacgtgcgttggcgcggcgatgaggggtccgggctgccgaggggggcgtaggggaccgggctaggcaagcccgcgggttgcgcggggttcccgtgggggtctaggctccctgggcacccgtgggggtcgtgggggtcgcgggtccctgggtatgcgcgggaccctgggttctctgggagatcgtggaactcgcggttccctgggctctcggggaacccggggctccctggggacacgtggtgccctgggaattcttgatggtcggacggcttcagatggcttcgggatcgagagggccgcacagactcgtagtagacccgaatctccacgtttccccgccgccggatcatggtcgccgccccggtgcgggggcccgtcggtcggaagcgagtgcccttcaagcgtgtccgctcctctgggctgcatgccgtcgaatggggtgccttttaaggaaaggtctcggctgcccgccccaaccggggtttgggggtgggccggggaaaccccggatgccatgggggggtcacaccctaagcgccggcgcgctggttgggtgggggtagaggggagtccccggtcgacgagatcgtaggtgtcccgtccacgaaggcggcgcccggcctgcgagaaagcgcggatgttgggatcggggtcccgtccccccgtcccgtccccccgtcccgtccccccgtcccgtccccccgtcccgtccccccgtcccgtccccccgtcccgtccccccgtcccgtccccccgtcccgtccccccgtcccgtccccccgtcccgtccccccgtccccccgccccgtccccccgccccgtccccccgccccgtccccccgtccccccgccccgtccccccgtccccccgtccccccgtcccgtccccccgtcccgtccccccgtcccgtccccccgccccgtccccccgtcccccgtcccgtcccccgtcccgtccccccgtcccgtccccccgtcccgtccccccgtccccgtccccccgtcccgtccccccgccccgtcccccgtccccccgtcccccgtcccgtcccccgtccccgtccccccgtccccccgtcccgtccccccccgtccccgtccccccgtccgtccccccgccccgtccccccgtccccccgtcccgtccccccgtccccccgtcccccgtcccgtccccccgtcccgtccccccgtccccgtccccgtccccgtcccccccgtcccgtcccccccgtccccgtccccccgtcccgtcccccgtcccgtcccccgtccccccgccccgtccccccccgtccccccgtcccgtccccccgtcccccgtccccccgtccccccgtccccccgccccgtcccgtccccccgtcccgtccccccgggtcaccgtacctgcgataaggctgcagtgggtggatgggtcctcgcggtacgtacagggtgggggggggggaagggaaaggcagaacgaaaaggaaccgatgcgcccgcgtctctgtatccgatccgatccgggtgcgtcggtgccccgctcgccgccggcgtctctgtctcgctgtggcccccttcgcgatgccgccgctgccgtcccggtctccgccgcgcagccggtgtgcccctggtgcggcggcgaccgggacgccggccctttatgtgcgcgaggaacggcccgccccccgtccgggcccgcctcggggcggggcccgcgtgatgacgcgggccccgggcagggcgccagcgctcgcactttgccctaataatatatatactattaggacgaagtgcgaacgcttcgcgttctcacttcttttaccctgcggccccgccccctttggggcggagcccgcgggatgacgcgggccccgggcagggcgccagcgctcgcactttgccctaataatatatatactattaggacgaagtgcgaacgcttcgcgttctcacttcttttaccctgcggccccgccccctttggggcggagccgcccgcggaccaacggggcgacctcgccggcccctttggggccggcgggggccaacgggagcgcggggccggcatctcattaccacgaacccggaagggcaggggagcgagcccgcccgcgacaagggtctcattagcatggcgggcggaagcggaagccgcccgcgccgggcgctaatgagatgccgcgcgggcggagccggcggcggcgcgaccaacgggccgccgccacggacgcggacgcgcgggcgtcggggcggggccgcgcataatgcggttccacctgggggcggaaccccggcgagccggggcgcggcggcgtcgatcgctcctcctccgcgtcctcctcctttccccccgccccgcgcgccccgaggactatatcagccaggcgacggggcgatcgtccacacggagcgcggctaccgacgcggccgccaggatctacccgatcggcgcggaggggcgaaaagacacaggcacacgcacgcaccgcacgggggggagagagaccgccaaccaccccccccccccccccactgccgcccctgaagaagaagaagaagaccccccccgcacaccccggtcggaggcgatgtcggcggagcagcggaagaagaagacgacgacgacgacgcagggccgcggggccgaggtcacgatggcggacgaggacgggggacgtctccgggccgcggcggagacgaccggcggccccggatctccggatccagccgacggaccgccgcccaccccgaacccggaccgtcgccccgccgcgcggcccgggttcgggtggcacggtgggccggaggagaacgaagacgaggacgacgacgccgccgccgatgccgacgaggcggccccggcgtccggggaggccgtcgacgagcctgccgcggacggcgtcgtctcgccgcggcagctggccctgctggcctcgatggtggacgaggccgttcgcacgatcccgtcgccccccccggagcgcgacggcgcggaagaagaagcagcccgctcgccttctccgccgcggaccccctccatgcgcgccgattatggcgaggagaacgacgacgacgacgatgacgatgacgacgaccgcgacgcgggccgctgggtccgcggaccggagacgacgtccgcggtccgcggggcgtacccggaccccatggccagcctgtcgccgcgacccccggcgccccgccgacaccaccaccgccaccaccgccgccggcgcgccccccgccggcgctcggccgcctctgactcatcaaaatccggatcctcgtcgtcggcgtcctccgcctcctcctccgcctcctcctcctcgtctgcatccgcctcctcgtctgacgacgacgacgacgacgacgccgccgcccgcgcccccgccagcgccgcagaccacgccgcgggcgggaccctcggcgcggacgacgaggaggcgggggtgcccgcgagggccccgggggcggcgccccggccgagcccgcccagggccgagcccgcccccggggccggggcgggctcggcccggacccccgcggcgaccgcgggccgcctggagcgccgccgggcccgcgcggcggtggccggccgcgacgccacgggccgcttcacggccgggcggccccggcgggtcgagctggacgccgacgcggcctccggcgccttctacgcgcgctaccgcgacgggtacgtcagcggggagccgtggcccggggccggccccccgcccccggggcgcgtgctgtacggcgggctgggcgacagccgccccggcctctggggggcgcccgaggcggaggaggcgcgggcccggttcgaggcctcgggcgccccggcgcccgtgtgggcgcccgagctgggcgacgcggcgcagcagtacgccctgatcacgcggctgctgtacacgccggacgcggaggcgatggggtggctccagaacccgcgcgtggcgcccggggacgtggcgctggaccaggcctgcttccggatctcgggcgcggcgcgcaacagcagctccttcatctccggcagcgtggcgcgggccgtgccccacctggggtacgccatggcggcgggccgcttcggctggggcctggcgcacgtggcggccgccgtggccatgagccgccgctacgaccgcgcgcagaagggcttcctgctgaccagcctgcgccgcgcctacgcgcccctgctggcgcgcgagaacgcggcgctgaccggggcgcgaacccccgacgacggcggcgacgccaaccgccacgacggcgacgacgcccgcgggaagcccgccgccgccgccgccccgttgccgtcggcggcggcgtcgccggccgacgagcgcgcggtgcccgccggctacggcgccgcgggggtgctcgccgccctggggcgcctgagcgccgcgcccgcctccgcgccggccggggccgacgacgacgacgacgacgacggccccggcggtggtggcggcggccggcgcgcggaggcgggccgcgtggccgtggagtgcctggccgcctgccgcgggatcctggaggcgctggcggagggcttcgacggcgacctggcggccgtgccggggctggccggagcccggcccgccgcgcccccgcgcccggggcccgcgggcgcggccgccccgccgcacgccgacgcgccccgcctgcgcgcctggctgcgcgagctgcggttcgtgcgcgacgcgctggtgctgatgcgcctgcgcggggacctgcgcgtggccggcggcagcgaggccgccgtggccgccgtgcgcgccgtgagcctggtcgccggggccctgggcccggcgctgccgcggagcccgcgcctgctgagctccgccgccgccgccgccgcggacctgctcttccagaaccagagcctgcgccccctgctggccgacaccgtcgccgcggccgactcgctcgccgcgcccgcctccgcgccgcgggaggcgcgcaagcgcaagagccccgccccggccagggcgccgcccggcggcgccccgcgccccccgaagaagagccgcgcggacgccccccgccccgcggccgcccctcccgcgggggccgcgccccccgccccgccgacgccgccgccgcggccgccgcgccccgcggcgctgacccgccggcccgccgagggccccgacccgcagggcggctggcggcgccagccgccggggcccagccacacgccggcgccctcggccgccgccctggaggcctactgcgccccgcgggccgtggccgagctcacggaccacccgctcttccccgcgccgtggcgcccggccctcatgttcgacccgcgcgcgctggcctcgctggccgcgcgctgcgccgccccgccccccggcggcgcgcccgccgccttcggcccgctgcgcgcctcgggcccgctgcgccgcgcggcggcctggatgcgccaggtgcccgacccggaggacgtgcgcgtggtgatcctctactcgccgctgccgggcgaggacctggccgcgggccgcgccgggggcgggccccccccggagtggtccgccgagcgcggcgggctgtcctgcctgctggcggccctgggcaaccggctctgcgggcccgccacggccgcctgggcgggcaactggaccggcgcccccgacgtctcggcgctgggcgcgcagggcgtgctgctgctgtccacgcgggacctggccttcgccggcgccgtggagttcctggggctgctggccggcgcctgcgaccgccgcctcatcgtcgtcaacgccgtgcgcgccgcggactggcccgccgacgggcccgtggtctcgcggcagcacgcctacctggcctgcgaggtgctgcccgccgtgcagtgcgccgtgcgctggccggcggcgcgggacctgcgccgcaccgtgctggcctccggccgcgtgttcgggccgggggtcttcgcgcgcgtggaggccgcgcacgcgcgcctgtaccccgacgcgccgccgctgcgcctctgccgcggggccaacgtgcggtaccgcgtgcgcacgcgcttcggccccgacacgctggtgcccatgtccccgcgcgagtaccgccgcgccgtgctcccggcgctggacggccgggccgccgcctcgggcgcgggcgacgccatggcgcccggcgcgccggacttctgcgaggacgaggcgcactcgcaccgcgcctgcgcgcgctggggcctgggcgcgccgctgcggcccgtctacgtggcgctggggcgcgacgccgtgcgcggcggcccggcggagctgcgcgggccgcggcgggagttctgcgcgcgggcgctgctcgagcccgacggcgacgcgcccccgctggtgctgcgcgacgacgcggacgcgggcccgcccccgcagatacgctgggcgtcggccgcgggccgcgcggggacggtgctggccgcggcgggcggcggcgtggaggtggtggggaccgccgcggggctggccacgccgccgaggcgcgagcccgtggacatggacgcggagctggaggacgacgacgacggactgtttggggagtgacggggggaaacttccgggagcgggggaggggggagatggggagagggggaaggaatcgggcgtctgtgcgcctttgagacagacgcggcgatggccgcgcgcgtgtgtgagaaataaagaacgagacagacgaaaacgtaccgccttgtgtggtttattcgggggtcgggcgggggtcggggtcgggcgggggtcggggtcgggcgggggtcggggtcgggcgggggtcggggtcgggcgggggtcggggtcgggcgggggtcggggtcgggcgggggtcggggtcgggcgggggtcggggtcgggcgggggtcggggtcgggcgggggtcggggtcgggcggcacgtctcccgcgcccgcggggggtctggggctctgacctgagtgcaggttacgaaggtcaggtggcccgagcccccccgcaggagcgggagggaaggcacggggcgcgggagggaggggctgctgcgagctcggggccgcgggcgcggggggaggggcggggggaagcccccggggcggggcgcggggggagcggccgggtccgggggcgggccgggagcggcgggcgcggggaagggggcgcgcggggccgccctgccgcccgcccgccgccgccgcccgccttaagccgcgcgggggcgggcgcgggaacgcagccctgcggcgcgcgggggggaggggctgctgcgagctcggcgggatggaggggagggtagggagggggtggcggggaaccgtgtgcgggcgggtgcttggtgctactgtgtggtctgccagggcgagcggtggtgcgactgttgtctttaggggggcggggagctcgggagtttgtggtggtccgcgaggtagccgagtgaggagggggcctgccgtggcacagcctgccgcgggggcgggcggagcggtggtgcgactgtcgccgtgacggcgggagtcttcgggggggggcgggcgcggggaccgcgaggtagccgagtgagtgagcctgctagtccccgtcctgccgcgcgggggcgggcgcgggaaaaaagccgcgcgggggcggacgcggggaagcgggcccgcggcgcgcggggggaggggcggcgcccgcgggggagcggccggttccgggggagggacggggaagggggcgcgcggggctgccctgccgcccgcccccggggaggggcggcgcccgcgggggagcggccgggtccgggggcgggccgggagcgccgggcgcggggaagggggcgcgcggggccgccctgccgcccgcccgccgccgccgcccgccttcgcgcccccccccaaaaacacccccccgggggttgactccccgggggaaaaaaggcggggcggg

SEQ ID NO: 242 - DNA, 150502 bp, synthetic construct
  source 1..150502: mol_type = other DNA
agcccgggccccccgcgggcgcgcgcgcgcgcaaaaaaggcgggcggcggtccgggcggcgtgcgcgcgcgcggcgggcgtggggggcggggccgcgggagcggggggaggagcggggggaggagcggggggaggagcggggggaggagcggggggaggagcggggggaggagcggggggaggagcggggggaggagcggggggaggagcggggggaggagcggggggaggagcggggggaggagcggggggaggagcggggggaggagcggggggaggagcggggggaggagcggggggaggagcggggggaggagcggccagaccccgaaaacgggccccccccaaaacacaccccccgggggtcgcgcgcggccctttaaagcggcggcggcgggcagcccgggccccccgcggccgagactagcgagttagacaggcaagcactactcgcctctgcacgcacatgcttgcctgtcaaactctaccaccccggcacgctctctgtctcccgttacacccgaggcggcctgggtcttccgcggagctcccgggagctccgcaccaagccgctctccggagagacgatggcaggagccgcgcatatatacgcttggagccagcccgccctcacagggcgggcccgcctcgggggcgggactggccaatcggcggccgccagcgcggcggggcccggccaaccagcgtccgccgagtcttcggggcccggcccattgggcgggagttaccgcccaatgggccgggccgcccacttcccggtatggtaattaaaaacttgcaagaggccttgttccgcttcccggtatggtaattagaaactcattaatgggcggccccggccgcccttcccgcttccggcaattcccgcggcccttaatgggcaaccccggtattccccgcctcccgcgccgcgcgtaaccactcccctggggttccgggttatgctaattgcttttttggcggaacacacggcccctcgcgcattggcccgcgggtcgctcaatgaacccgcattggtcccctggggttccgggtatggtaatgagtttcttcgggaaggcgggaagccccggggcaccgacgcaggccaagcccctgttgcgtcggcgggaggggcatgctaatggggttctttgggggacaccgggttgggcccccaaatcgggggccgggccgtgcatgctaatgatattctttgggggcgccgggttggtccccggggacggggccgccccgcggtgggcctgcctcccctgggacgcgcggccattgggggaatcgtcactgccgcccctttggggaggggaaaggcgtggggtataagttagccctggcccgacagtctggtcgcatttgcacctcggcactcggagcgagacgcagcagccaggcagactcgggccgccccctctccgcatcaccacagaagccccgcctacgttgcgacccccagggaccctccgtccgcgaccctccagccgcatacgacccccatggagccccgccccggagcgagtacccgccggcctgagggccgcccccagcgcgaggtgaggggccgggcgccatgtctggggcgccatattggggggcgccatattggggggcgccatgttgggggacccccgacccttacactggaaccggccgccatgttgggggacccccactcatacacgggagccgggcgccatgttggggcgccatgttagggggcgtggaaccccgtgacactatatatacagggaccgggggcgccatgttagggggtgcggaaccccctgaccctatatatacagggaccggggtcgccctgttgggggtcgccatgtgaccccctgactttatatatacagacccccaacacatacacatggcccctttgactcagacgcagggcccggggtcgccgtgggaccccctgactcatacacagagacacgcccccacaacaaacacacagggaccggggtcgccgtgttgggggcgtggtccccactgactcatacgcaggccccccttactcacacgcatctaggggggtggggaggagccgcccgccatatttgggggacgccgtgggacccccgactccggtgcgtctggagggcgggagaagagggaagaagaggggtcgggatccaaaggacggacccagaccacctttggttgcagacccctttctcccccctcttccgaggccagcaggggggcaggactttgtgaggcgggggggggagagggggaactcgtgggtgctgattgacgcgggaaatccccccccattcttacccgccccccttttttccccttagcccgccccggatgtctgggtgtttccctgcgaccgagacctgccggacagcagcgactctgaggcggagaccgaagtgggggggcggggggacgccgaccaccatgacgacgactccgcctccgaggcggacagcacggacacggaactgttcgagacggggctgctggggccgcagggcgtggatgggggggcggtctcgggggggagccccccccgcgaggaagaccccggcagttgcgggggcgccccccctcgagaggacggggggagcgacgagggcgacgtgtgcgccgtgtgcacggatgagatcgcgccccacctgcgctgcgacaccttcccgtgcatgcaccgcttctgcatcccgtgcatgaaaacctggatgcaattgcgcaacacctgcccgctgtgcaacgccaagctggtgtacctgatagtgggcgtgacgcccagcgggtcgttcagcaccatcccgatcgtgaacgacccccagacccgcatggaggccgaggaggccgtcagggcgggcacggccgtggactttatctggacgggcaatcagcggttcgccccgcggtacctgaccctgggggggcacacggtgagggccctgtcgcccacccacccggagcccaccacggacgaggatgacgacgacctggacgacggtgaggcggggggcggcaaggaccctgggggaggaggaggaggagggggggggagggaggaataggcgggcgggcgaggaaagggcgggccggggagggggcgtaacctgatcgcgccccccgttgtctcttgcagcagactacgtaccgcccgccccccgccggacgccccgcgcccccccacgcagaggcgccgccgcgccccccgtgacgggcggggcgtctcacgcagccccccagccggccgcggctcggacagcgcccccctcggcgcccatcgggccacacggcagcagtaacaccaacaccaccaccaacagcagcggcggcggcggctcccgccagtcgcgagccgcggcgccgcggggggcgtctggcccctccgggggggttggggttggggttggggttgttgaagcggaggcggggcggccgaggggccggacgggcccccttgtcaacagacccgccccccttgcaaacaacagagaccccatagtgatcagcgactcccccccggcctctccccacaggccccccgcggcgcccatgccaggctccgccccccgccccgggccccccgcgtccgcggccgcgtcgggacccgcgcgcccccgcgcggccgtggccccgtgcgtgcgagcgccgcctccggggcccggcccccgcgccccggcccccggggcggagccggccgcccgccccgcggacgcgcgccgtgtgccccagtcgcactcgtccctggctcaggccgcgaaccaagaacagagtctgtgccgggcgcgtgcgacggtggcgcgcggctcgggggggccgggcgtggagggtgggcacgggccctcccgcggcgccgccccctccggcgccgccccgctcccctccgccgcctctgtcgagcaggaggcggcggtgcgtccgaggaagaggcgcgggtcgggccaggaaaacccctccccccagtccacgcgtccccccctcgcgccggcaggggccaagagggcggcgacgcaccccccctccgactcagggccgggggggcgcggccagggtgggcccgggacccccctgacgtcctcggcggcctccgcctcttcctcctctgcctcttcctcctcggccccgacccccgcgggggccgcctcttccgccgccggggccgcgtcctcctccgcttccgcctcctcgggcggggccgtcggtgccctgggagggagacaagaggaaacctccctcggcccccgcgctgcttctgggccgcgggggccgaggaagtgtgcccggaagacgcgccacgcggagacttccggggccgtccccgcgggcggcctcacgcgctacctgcccatctcgggggtctctagcgtggtcgccctgtcgccttacgtgaacaagactatcacgggggactgcctgcccatcctggacatggagacggggaacatcggggcgtacgtggtcctggtggaccagacgggaaacatggcgacccggctgcgggccgcggtccccggctggagccgccgcaccctgctccccgagaccgcgggtaaccacgtgatgccccccgagtacccgacggcccccgcgtcggagtggaacagcctctggatgacccccgtggggaacatgctgttcgaccagggcaccctagtgggcgccctggacttccgcagcctgcggtctcggcacccgtggtccggggagcagggggcgtcgacccgggacgagggaaaacaataagggacgccccccgtgtttgtggggaggggggggtcgggcgctgggtggtctctggccgcgcccactacaccagccaatccgtgtcggggaggggaaaagtgaaagacacgggcaccacacaccagcgggtcttttgtgttggccctaataaaaaaaaactcaggggatttttgctgtctgttgggaaataaaggtttacttttgtatcttttccctgtctgtgttggatgtatcgcggggatgcgtgggagtgggggtgcgtgggagtgggggtgcgtgggagtgggggtgcgtgggagtgggggtgcgtgggagtgggggtgcgtgggagtgggggtgcgtgggagtgggggtgcgtgggagtgggggtgcgtgggagtgggggtgccatgttgggcaggctctggtgttaaccacagagccgcggcccgggctgcctgaccaccgatccccgaaagcatcctgccactggcatggagccagaaccacagtgggttgggtgtgggtgttaagtttccgcgagcgcctgcccgcccggactgacctggcctctggccgccacaaagggcggggggggttaactacactatagggcaacaaaggatgggaggggtggcggggcgggacggggcgcccaaaagggggtcggccacaccacagacgtgggtgttggggggtggggcggaggggtgggggggggggagacagaaacaggaacatagttagaaaacaagaatgcggtgcagccagagaatcacaggagacgaggggatgggcgtgttggttaccaacccacacccaggcatgctcggtggtatgaaggagggggggcggtgcttcttagagaccgccgggggacgtggggttggtgtgcaaaggcacgcgcacccgcgccggccaggtgggccggtactccatccccccctcccccgacccttcccacccccgcgtgccagagatcaccccggtcccccggcacccgccactcctccgtatcctcgctttaggaacaactttagggggggtacacacgcgccgtgcatttccttccacaccccccctcccccgcactccccccccccaggcagtaagacccaagcatagagagccaggcacaaaaacacaggcggggtgggacacatgccttcttggagtacgtgggtcattggcgtggggggttacagcgacaccggccgaccccctggcggtcttccagccggcccttagataagggggcagttggtggtcggacgggtaagtaacagagtctgactaagggtgggagggggggaaaagaacgggctggtgtgctgtaacacgagcccacccgcgagtggcgtggccgaccttagcctctggggcgccccctgtcgtttgggtcccccccctctattggggagaagcaggtgtctaacctacctggaaacgcggcgtctttgttgaacgacaccggggcgccctcgacgagtgggataacgggggaggaagggagggaggagggtactgggggtgaagaaggggggggggagaagcgagaacaggaaaggcgatggagcccggcagaacaccgaggaaaaaaaaaccacagcgcatgcgccgggccgttgtggggccccgggccggggccccttgggtccgccggggccccgggccgggccgccacgggggccggccgttggcggtaaccccgagtgttcatctcaggccccgggccgggaacccggaaaagcctccggggggcctttttcgcgtcgcgtgccggcgagcgggtccggacggggcccggaccgccgcggtcgggggcccctcgtcccgggccgtacgcggccttcgccccgtgaggggacagacgaacgaaacattccggcgacggaacgaaaaacaccccagacgggttaaagaaacagaaaccgcaacccccaccacccccgaaacggggaaaacgaaaaaacagaccagcggccggccggcgcttagggggaggatgtcgccgacgccccttggccgccccggctgcaggggggcccggagagccgcggcacccggacgcgcccggaaagtctttcgcaccacccgcgatcggcacggccgcgcccccgcttttataaaggctgagatgacgcagcaaaaacaggccacagcaccacgtgggtaggtgatgtaattttattttcctcgtctgcggcctaatggatttccgggcgcggtgcccctgtctgcagagcacttaacggattgatatctcgcgggcacgcgcgcccttaatggaccggcgcggggcggggggccggatacccacacgggcggggggggggtgtcgcgggccgtctgctggcccgcggccacataaacaatgactctgggcctttctgcctctgccgcttgtgagtgcgcgcgccggctctgcggtgtcggcggcggctgcggcggctgcggcggccgccgtgttcggtctcggtagccggccggcgggtggactcgcggggggccggagggtggaaggcaggggggtgtaggatgggtatcaggacttccacttcccgtccttccatcccccgttcccctcggttgttcctcgcctcccccaacaccccgccgctttccgttggggttgttattgttgtcgggatcgtgcgggccgggggtcgccggggcaggggcgggggcgtgggcgggggtgctcgtcgatcgaccgggctcagtgggggcgtggggtgggtgggagaaggcgaggagactggggtgggggtgtcggtgggtggttgttttttgtggttgtttttgtgtctgttcccgtcccccgtcaccccctccctccgtcccctccgtccccccgtcgcgggtgtttgtgtttgtttattccgacattggtttatttaaataaacacagccgttctgcgtgtctgttcttgcgtgtggctgggggcttatatgtggggtcccgggggcgggatggggtttagcggcggggggcggcgcgccggacggggcgctggagataacggcccccggggaacgggggaccggggctgggtatcccgaggtgggtgggtgggcggcggtggccgggccgggccgggccgggccgggccgggtgggcggggtttggaaaaacgaggaggaggaggagaaggcgggggggggggagacggggggaaagcaaggacacggcccggggggtgggagcgcgggccgggccgctcgtaagagccgcgacccggccgccggggagcgttgtcgccgtcggtctgccggcccccgtccctcccttttttgaccaaccagcgccccccccccctcaccaccattcctactaccaccaccaccaccaccaccgacacctcccgcgcacccccgcccacatccccccccaacccgcaccaccagcacgggttgggggtagcaggggatcaaaggggggcaaagccggcggggcggttcggggggggggggggggggcgggagaccaagtaggcccgcccatccgcggcccctcccggcagccacgcccccagcgtcgggtgtcacggggaaagagcagaggggagaggggagagggggggagaggggagagggggggagaggggagagggggggagaggggagagggggggagaggggagagggggggagaggggagagggggggagaggggagagggggggagaggggagagggggggagaggggagagggggggagaggggagagggggggagagggggtatataaaccaacgaaaagcgcgggaacggggatacggggcttgtgtggcacgacgtcgtggttgtgttactgggcaaacacttggggactgtaggtttctgtgggtgccgaccctaggcgctatggggattttgggttgggtcgggcttattgccgttggggttttgtgtgtgcgggggggcttgccttcaaccgaatatgttattcggagtcgggtggctcgagaggtgggggatatattaaaggtgccttgtgtgccgctcccgtctgacgatcttgattggcgttacgagaccccctcggctataaactatgctttgatagacggtatatttttgcgttatcactgtcccggattggacacggtcttgtgggataggcatgcccagaaggcatattgggttaacccctttttatttgtggcgggttttttggaggacttgagttaccccgcgtttcctgccaacacccaggaaacagaaacgcgcttggccctttataaagagatacgccaggcgctggacagtcgcaagcaggccgccagccacacacctgtgaaggctgggtgtgtgaactttgactattcgcgcacccgccgctgtgtagggcgacaggatttgggacctaccaacggaacgtctggacggaccccggttctgccgccggacgatgaagcgggcctgcagccgaagcccctcaccacgccgccgcccatcatcgccacgtcggaccccaccccgcgacgggacgccgccacaaaaagcagacgccgacgaccccactcccggcgcctctaacgatgcctcgacggaaacccgtccgggttcggggggcgaaccggccgcctgtcgctcgtcagggccggcgggcgctcctcgccgccctagaggctgtcccgctggtgtgacgttttcctcgtccgcgccccccgaccctcccatggatttaacaaacgggggggtgtcgcctgcggcgacctcggcgcctctggactggaccacgtttcggcgtgtgtttctgatcgacgacgcgtggcggcccctgatggagcctgagctggcgaaccccttaaccgcccacctcctggccgaatataatcgtcggtgccagaccgaagaggtgctgccgccgcgggaggatgtgttttcgtggactcgttattgcacccccgacgaggtgcgcgtggttatcatcggccaggacccatatcaccaccccggccaggcgcacggacttgcgtttagcgtgcgcgcgaacgtgccgcctcccccgagtcttcggaatgtcttggcggccgtcaagaactgttatcccgaggcacggatgagcggccacggttgcctggaaaagtgggcgcgggacggcgtcctgttactaaacacgaccctgaccgtcaagcgcggggcggcggcgtcccactctagaatcggttgggaccgcttcgtgggcggagttatccgccggttggccgcgcgccgccccggcctggtgtttatgctctggggcacacacgcccagaatgccatcaggccggaccctcgggtccattgcgtcctcaagttttcgcacccgtcgcccctctccaaggttccgttcggaacctgccagcatttcctcgtggcgaaccgatacctcgagacccggtcgatttcacccatcgactggtcggtttgaaaggcatcgacgtccggggtttttgtcggtgggggcttttgggtatttccgatgaataaagacggttaatggttaaacctctggtctcatacgggtcggtgatgtcgggcgtcgggggagagggagttccctctgcgcttgcgattctagcctcgtggggctggacgttcgacacgccaaaccacgagtcggggatatcgccagatacgactcccgcagattccattcggggtgccgctgtggcctcacctgaccaacctttacacgggggcccggaacgggaggccacagcgccgtctttctccccaacgcgcgcggatgacggcccgccctgtaccgacgggccctacgtgacgtttgataccctgtttatggtgtcgtcgatcgacgaattagggcgtcgccagctcacggacaccatccgcaaggacctgcggttgtcgctggccaagtttagcattgcgtgcaccaagacctcctcgttttcgggaaacgccccgcgccaccacagacgcggggcgttccagcgcggcacgcgggcgccgcgcagcaacaaaagcctccagatgtttgtgttgtgcaaacgcgcccacgccgctcgagtgcgagagcagcttcgggtcgttattcagtcccgcaagccgcgcaagtattacacgcgatcttcggacgggcggctctgccccgccgtccccgtgttcgtccacgagttcgtctcgtccgagccaatgcgcctccaccgagataacgtcatgctggcctcgggggccgagtaaccgccccccccccatgccaccctcactgcccgtcgcgcgtgtttgatgttaataaataacacataaatttggctggttgtttgttgtctttaatggaccgcccgcaagggggggggggcatttcagtgtcgggtgacgagcgcgatccggccgggatcctaggaccccaaaagtttgtctgcgtattccagggcggggctcagttgaatctcccgcagcacctctaccagcaggtccgcggtgggctggagaaactcggccgtcccggggcaggcggttgtcgggggtggaggcgcggcgcccaccccgtgtgccgcgcctggcgtctcctctgggggcgacccgtaaatggttgcagtgatgtaaatggtgtccgcggtccagaccacggtcaaaatgccggccgtggcgctccgggcgctttcgccgcgcgaggagctgacccaggagtcgaacggatacgcgtacatatgggcgtcccacccgcgttcgagcttctggttgctgtcccggcctataaagcggtaggcacaaaattcggcgcgacagtcgataatcaccaacagcccaatgggggtgtgctggataacaacgcctccgcgcggcaggcggtcctggcgctcccggccccgtaccatgatcgcgcgggtgccgtactcaaaaacatgcaccacctgcgcggcgtcgggcagtgcgctggtcagcgaggccctggcgtggcataggctatacgcgatggtcgtctgtggattggacatctcgcggtgggtagtgagtcccccgggccgggttcggtggaactgtaaggggacggcgggttaatagacaatgaccacgttcggatcgcgcagagccgatagtatgtgctcactaatgacgtcatcgcgctcgtggcgctcccggagcggatttaagttcatgcgaaggaattcggaggaggtggtgcgggacatggccacgtacgcgctgttgaggcgcaggttgccgggcgtaaagcagatggcgaccttgtccaggctaaggccctgggagcgcgtgatggtcatggcaagcttggagctgatgccgtagtcggcgtttatggccatggccagctccgtagagtcaatggactcgacaaactcgctgatgttggtgttgacgacggacatgaagccgtgttggtcccgcaagaccacgtaaggcaggggggcctcttccagtaactcggccacgttggccgtcgcgtgccgcctccgcagctcgtccgcaaaggcaaacacccgtgcgtacgtgtatcccatgagcgtataattgtccgtctgcagggcgacggacatcagccccccgcgcggcgagccggtcagcatctcgcagccccggaagataacgttgtccacgtacgtgctaaagggggcgacttcaaatgcctccccgaagagctcttggaggattcggaatctcccgaggaaggcccgcttcagcagcgcaaactgggtgtgaacggcggcggtggtctccggttccccgggggtgtagtggcagtaaaacacgtcgagctgttgttcgtccagccccgcgaaaataacgtcgaggtcgtcgtcgggaaaatcgtccgggcccccgtcccgcggccccagttgcttaaaatcaaacgcacgctcgccgggggcgcctgcgtcggccattaccgacgcctgcgtcggcacccccgaagatttggggcgcagagacagaatctccgccgttagttctcccatgcgggcgtaggcgagggtcctctgggtcgcatccaggcccgggcgctgcagaaagttgtaaaaggagataagcccgctaaatatgagccgcgacaggaacctgtaggcaaactccaccgaagtctccccctgagtctttacaaagctgtcgtcacgcaacactgcctcgaaggcccggaacgtcccactaaacccaaaaaccagttttcgcaggcgcgcggtcaccgcgatctggctgttgaggacgtaagtgacgtcgttgcgggccacgaccagctgctgtttgctgtgcacctcgcagcgcatgtgccccgcgtcctggtcctggctctgcgagtagttggtgatgcggctggcgttggccgtgagccacttttcaatcgtcaggccgggctggtgtgtcagccgtcggtattcgtcaaactccttgaccgacacgaacgtaagcacggggagggtgaacacgacgaactccccctcacgggtcaccttcaggtaggcgtggagcttggccatgtacgcgctcacctctttgtgggaggagaacagccgcgtccagccggggaggttggcggggttggtgatgtagttttccgggacgacgaagcgatccacgaactgcatgtgctcctcggtgatgggcaggccgtactccagcaccttcatgaggttaccgaactcgtgctcgacgcaccgtttgttgttaataaaaatggcccagctatacgagaggcgggcgtactcgcgcagcgtgcggttgcagatgaggtacgtgagcacgttctcgctctggcggacggaacaccgcagtttctggtgctcgaaggtcgactccagggacgccgtctgcgtcggcgagcccacacacaccaacacgggccgcaggcgggccgcgtactggggggtgtggtacagggcgttaatcatccaccagcaatacaccacggccgtgaggaggtgacgcccaaggagcccggcctcgtcgatgacgatcacgttgctgcgggtaaaggccggcagcgccccgtgggtggccggggccaaccgcgtcagggcgccctcggccaaccccagggtccgttccagggcggccagggcgcgaaactcgttccgcaactcctcgcccccggaggcggccagggcgcgcttcgtgaggtccaaaatcacctcccagtagtacgtcagatctcgtcgctgcaggtcctccagcgaggcggggttgctggtcagggtgtacgggtactgtcccagttgggcctggacgtgattcccgcgaaacccaaattcatgaaagatggtgttgatgggtcggctgagaaaggcgcccgagagtttggcgtacatgttttgggccgcaatgcgcgtggcgcccgtcaccacacagtccaagacctcgttgattgtctgcacgcacgtgctctttccggagccagcgttgccggtgataagatacaccgcgaacggaaactccctgaggggcaggcctgcgggggactctaaggccgccacgtcccggaaccactgcagatggggcacttgcgctccgtcgagctgttgttgcgagagctctcggatgcgcttaaggattggctgcaccccgtgcatagacgtaaaatttaaaaaggcctcggccctccctggaacggctggtcggtccccgggttgctgaaggtgcggcgggccgggtttctgtccgtctagctggcgctccccgccggccgccgccatgaccgcaccacgctcgcgggcccccactacgcgtgcgcggggggacacggaagcgctgtgctcccccgaggacggctgggtaaaggttcaccccacccccggtacgatgctgttccgcgagattctccacgggcagctggggtataccgagggccagggggtgtacaacgtcgtccggtccagcgaggcgaccacccggcagctgcaggcggcgatctttcacgcgctcctcaacgccaccacttaccgggacctcgaggcggactggctcggccacgtggcggcccgcggtctgcagccccaacggctggttcgccggtacaggaacgcccgggaggcggatatcgccggggtggccgagcgggtgttcgacacgtggcggaacacgcttaggacgacgctgctggactttgcccacgggttggtcgcctgctttgcgccgggcggcccgagcggcccgtcaagcttccccaaatatatcgactggctgacgtgcctggggctggtccccatattacgcaagcgacaagaagggggtgtgacgcagggtctgagggcgtttctcaagcagcacccgctgacccgccagctggccacggtcgcggaggccgcggagcgcgccggccccgggttttttgagctggcgctggccttcgactccacgcgcgtggcggactacgaccgcgtgtatatctactacaaccaccgccggggcgactggctcgtgcgagaccccatcagcgggcagcgcggagaatgtctggtgctgtggccccccttgtggaccggggaccgtctggtcttcgattcgcccgtccagcggctgtttcccgagatcgtcgcgtgtcactccctccgggaacacgcgcacgtctgccggctgcgcaataccgcgtccgtcaaggtgctgctggggcgcaagagcgacagcgagcgcggggtggccggtgccgcgcgggtcgttaacaaggtgttgggggaggacgacgagaccaaggccgggtcggccgcctcgcgcctcgtgcggcttatcatcaacatgaagggcatgcgccacgtaggcgacattaacgacaccgtgcgtgcctacctcgacgaggccggggggcacctgatagacgccccggccgtcgacggtaccctccctggattcggcaagggcggaaacagccgcgggtctgcgggccaggaccagggggggcgggcgccgcagcttcgccaggccttccgcacggccgtggttaacaacatcaacggcgtgttggagggctatataaataacctgtttggaaccatcgagcgcctgcgcgagaccaacgcgggcctggcgacccaattgcaggagcgcgaccgcgagctccggcgcgcaacagcgggggccctggagcgccagcagcgcgcggccgacctggcggccgagtccgtgaccggtggatgcggcagccgccctgcgggggcggacctgctccgggccgactatgacattatcgacgtcagcaagtccatggacgacgacacgtacgtcgccaacagctttcagcacccgtacatcccttcgtacgcccaggacctggagcgcctgtcgcgcctctgggagcacgagctggtgcgctgttttaaaattctgtgtcaccgcaacaaccagggccaagagacgtcgatctcgtactccagcggggcgatcgccgcattcgtcgccccctactttgagtcagtgcttcgggccccccgggtaggcgcgcccatcacgggctccgatgtcatcctgggggaggaggagttatgggatgcggtgtttaagaaaacccgcctgcaaacgtacctgacagacatcgcggccctgttcgtcgcggacgtccagcacgcagcgctgcccccgcccccctccccggtcggcgccgatttccggcccggcgcgtccccgcggggccggtccagatcgcggtcgcccggaagaactgcgcgaggcgcgccggaccagggcgggggcatcgggcaccgggatggccgccgcgacggccgacgatgaggggtcggccgccaccatcctcaagcaggccatcgccggggaccgcagcctggtcgaggcggccgaggcgattagccagcagacgctgctccgcctggcctgcgaggtgcgccaggtcggcgaccgccagccgcggtttaccgccaccagcatcgcgcgcgtcgacgtcgcgcctgggtgccggttgcggttcgttctggacgggagtcccgaggacgcctatgtgacgtcggaggattactttaagcgctgctgcggccagtccagttatcgcggcttcgcggtggcggtcctgacggccaacgaggaccacgtgcacagcctggccgtgccccccctcgttctgctgcaccggttctccctgttcaaccccagggacctcctggactttgagcttgcctgtctgctgatgtacctggagaactgcccccgaagccacgccaccccgtcgacctttgccaaggttctggcgtggctcggggtcgcgggtcgccgcacgtccccattcgaacgcgttcgctgccttttcctccgcagttgccactgggtcctaaacacactcatgttcatggtgcacgtaaaaccgttcgacgacgagttcgtcctgccccactggtacatggcccggtacctgctggccaacaacccgccccccgttctctcggccctgttctgtgccaccccgacgagctcctcattccggctgccggggccgcccccccgctccgactgcgtggcctataaccccgccgggatcatggggagctgctgggcgtcggaggaggtgcgcgcgcctctggtctattggtggctttcggagaccccaaaacgacagacgtcgtcgctgttttatcagttttgttgaattttaggaaataaacccggttttgtttctgtggcctcccgacggatgcgcgtgtccttactccgtcttggtgggtgggtggctgtgtatggcgtcccatctgtgcggggaggggggcaagtcggcacgtattcggacagactcaagcacacacgggggagcgctcttgtctcagggcaatgtttttattggtcaaactcaggcaaacagaaacgacatcttgtcgtcaaagggatacacaaacttccccccctcgccccatactcccgccagcaccccggtaaacaccaactcaatctcgcgcaggatttcgcgcaggtgatgagcgcagtccacgggggggagcacaaggggccgcgggtatagatcgacggggacgccgaccgactccccgcctccgggacagacacgcacgacgcgccgccagtagtgctctgcgtccagcaaggcgccgccgcggaaggcagtggggggcaaggggtcgctggcctcaaagggggacacccgaacgctccagtactccgcgtccaaccgtttattaaacgcgtccaagataaggcggtcgcaggcgtcctccataaggccccgggccgtgagtgcgtcctcctccggcacgcatgccgttgtcaggcccaggacccgtcgcagcgtgtcgcgtacgacccctgccgccgtggtgtacgcgggcccgcggagaggaaatcccccaagatggtcagtgttgtcgcgggagttccagaaccacactcccgcctggctccaggcgactgcgtgggtgtagacgccctcgagggccaggcacagtgggtgccgcagccggaggccgttggccctaagcacggctcccacggccgtctcgatggcccgccgggcgtcctcgatcaccccggaagccgcatccgcgtcttgggggtccacgttaaagacaccccagaacgcacccccatcgcccccgcagaccgcgaacttcaccgagctggccgtctcctcgatctgcaggcagacggcggccattaccccacccaggagctgccgcagcgcagggcaggcgttgcacgtgtccgggaccaggcgctccaagacggccccggcccagggctctgagggagcggccaccaccagcgcgtccagtcttgctaggcccgtccggccgtgggggtccgccagcccgctccccccgaggtcggccagggccgccaggagctgggcgcgaagtccggggaagcaaaaccgcgccgtccagacgggcccgacggccgcgggcgggtctaacagttggatgattttagtggcgggatgccaccgcgccaccgcctcccgcaccgcgggcaggaggcatccggctgccgccgaggccacgccgggccaggctcgcggggggaggacgaccctggcccccaccgcgggccaggcccccaggagcgcggcgtaagcggccgcggccccgcgcaccaggtcccgtgccgactcggccgtggccggcacggtgaacgtgggccaacccggaaaccccaggacggcaaagtacgggacgggtcccccccggacctcaaactcgggccccagaaaggcaaagacgggggccagggccccgggggcggcgtggaccgtggtatgccactgccggaaaagggcgacgagcgccggcgcggagaacttctcgccggcgcttacaaagtagtcgtaatcgcggggcagcagcacccgtgccgtgactcgttgcgggtgcccgcgtggccgcaggcccacctcgcacacctcgaccaggtccccgaacgcgccctccttcttgatcggcggaaacgcaagagtctggtattcgcgcgcaaatagcgcggttccggtggtgatgttaacggtcagcgaagcggcggacgcgcactggggggtgtcgcgaatggccgccaggcgcgcccacgccagccgcgcgtcgggatgctcggcaacgcgcgccgccagggccatagggtcgatgtcaatgttggcctccgcgaccaggagagcggcgcgaggggcggcgggcgggccccacgacgctctctcaactttcaccaccagtcccgtgcgtgggtccgagccgatacgcagcggggcgaacagggccaccggcccggtctggcgctccagggccgccaggacgcacgcgtacagcgcccgccacagagtcgggttctccaggggctccagcggggaggcggccggcgtcgtcgcggcgcgggcggccgccacgacggcctggacggagacgtccgcggagccgtagaaatcccgcagctccgtcgcggtgacggagacctccgcaaagcgcgcgcgaccctcccctgcggcgttgcgacatacaaaatacaccagggcgtggaagtactcgcgagcgcgggggggcagccataccgcgtaaagggtaatggcgctgacgctctcctccacccacacgatatctgcggtgtccatcgcacggcccctaaggatcacgggcggtctgtgggtcccatgctgccgtgcctggccgggcccggtgggtcgcggaaaccggtgacggggggggggcggtttttggggttggggtgggggtgggaaacggcccgggtccgggggccaacttggcccctcggtgcgttccggcaacagcgccgccggtccgcggacgaccacgtaccgaacgagtgcggtcccgagacttatagggtgctaaagttcaccgccccctgcatcatgggccaggcctcggtggggagctccgacagcgccgcctccaggatgatgtcagcgttggggttggcgctggatgagtgcgtgcgcaaacagcgcccccacgcgggcacgcgtagcttgaagcgcgcgcccgcaaactcccgcttgtgggccataagcagggcgtacagctgcctgtgggtccggcaggcgctgtggtcgatgtggtgggcgtccaacaaccccacgattgtctgtttggtgaggtttttaacgcgccccgccccgggaaacgtctgcgtgcttttggccatctgcacgccaaacagttcgccccagattatcttgaacagcgccaccgcgtggtccgtctcgctaacggacccgcgcgggggacagccgcttagggcgtcggcgacgcgcttgacggcttcctccgagagcagaagtccgtcggttacgttacagtggcccagttcgaacaccagctgcatgtagcggtcgtagtggggggtcagtaggtccagcacgtcatcggggccgaaggtcctcccagatcccccggccgccgagtcccaatgcaggcgcgcggccatggtgctgcacaggcacaacagctcccagacgggggttacgttcagggtggggggcagggccacgagctccagctctccggtgacgttgatcgtggggatgacgcccgtggcgtagtggtcatagatccgccgaaatatggcgctgctgcgggtggccatgggaacgcggagacaggcctccagcaacgccaggtaaataaaccgcgtgcgtcccatcaggctgttgaggttgcgcatgagcgcgacaatttccgccggcgcgacatcggaccggaggtatttttcgacgaaaagacccacctcctccgtctcggcggcctgggccggcagcgacgcctcgggatcccggcaccgcagctcccgtagatcgcgctgggccctgagggcgtcgaaatgtacgccccgcaaaaacagacagaagtcctttggggtcagggtatcgtcgtgtccccagaagcgcacgcgtatgcagtttagggtcagcagcatgtgaaggatgttaaggctgtccgagagacacgccagcgtgcatctctcaaagtagtgtttgtaacggaatttgttgtagatgcgcgacccccgccccagcgacgtgtcgcatgccgacgcgtcacagcgccccttgaaccggcgacacagcaggtttgtgacctgggagaactgcgcgggccactggccgcaggaactgaccacgtgattaaggagcatgggcgtaaagacgggctccgagcgcgccccggagccgtccatgtaaatcagtagctcccccttgcggagggtgcgcacccgtcccagggactggtacacggacaccatgtccggtccgtagttcatgggtttcacgtaggcgaacatgccatcaaagtgcaggggatcgaagctgaggcccacggttacgaccgtcgtgtatataaccacgcggtattggccccacgtggtcacgtccccgaggggggtgagcgagtgaagcaacagcacgcggtccgtaaactgacggcagaaccgggccacgatctccgcgaaggagaccgtcgacgaaaaaatgcagatgttatcgcccccgccaaggcgcgcttccagctccccaaagaacgtggccccccgggcgtccggagaggcgtccggagacgggccgctcggcggcccgggcgggcgcagggcagcctgcaggagctcggtccccagacgcgggagaaacaggcaccggcgcgccgaaaacccgggcatggcgtactcgccgaccaccacatgcacgtttttttcgccccggagaccgcacaggaagtccaccaactgcgcgttggcggttgcgtccatggcgatgatccgaggacaggtgcgcagcaggcgtagcattaacgcatccacgcggcccagttgctgcatcgttggcgaatagagctggcccagcgtcgacataacctcgtccagaacgaggacgtcgtagttgttcagaaggttggggcccacgcgatgaaggctttccacctggacgataagtcggtggaaggggcggtcgttcataatgtaattggtggatgagaagtaggtgacaaagtcgaccaggcctgactcagcgaaccgcgtcgctagggtctgggtaaaactccgacgacaggagacgacgagcacactcgtgtccggagagtggatcgcttcccgcagccagcggatcagcgcggtagtttttcccgaccccattggcgcgcggaccacagtcacgcacctggccgtcggggcgctcgcgttggggaaggtgacgggtccgtgctgctgccgctcgatcgttgttttcgggtgaacccggggcacccattcggccaaatcccccccgtacaacatccgcgctagcgatacgctcgacgtgtactgttcgcactcgtcgtccccaatgggacgcccggcccccagaggatctcccgactccgcgccccccacgaaaggcatgaccggggcgcggacggcgtggtgggtctggtgtgtgcaggtggcgacgtttgtggtctctgcggtctgcgtcacggggctcctcgtcctggcctctgtgttccgggcacggtttccctgcttttacgccacggcgagctcttatgccggggtgaactccacggccgaggtgcgcgggggtgtagccgtgcccctcaggttggacacgcagagccttgtgggcacttatgtaatcacggccgtgttgttgttggccgtggccgtgtatgccgtggtcggcgccgtgacctcccgctacgaccgcgccctggacgcgggccgccgtctggctgcggcccgcatggccatgccgcacgccacgctgatcgccggaaacgtctgctcttggttgctgcagatcaccgtcctgttgctggcccatcgcatcagccagctggcccacctggtttacgtcctgcactttgcgtgtctggtgtattttgcggcccatttttgcaccaggggggtcctgagcgggacgtatctgcgtcaggtgcacggcctgatggagctggccccgacccatcatcgcgtcgtcggcccggctcgcgccgtgctgacaaacgccttgctgttgggcgtcttcctgtgcacggccgacgccgcggtatccctgaataccatcgccgcgttcaactttaatttttcggccccgggcatgctcatctgcctgaccgtgctgttcgccattctcgtcgtatcgctgttgttggtggtcgagggggtgttgtgtcactacgtgcgcgtgttggtgggcccccacctgggggccgtggccgccacgggcatcgtcggcctggcctgcgagcactattacaccaacggctactacgttgtggagacgcagtggccgggggctcagacgggagtccgcgtcgccctcgccctggtcgccgcctttgccctcggcatggccgtgctccgctgcacccgcgcctatctgtatcacaggcggcaccacaccaaattttttatgcgcatgcgcgacacgcgacaccgcgcacattccgccctcaagcgcgtacgcagttccatgcgcggatcgcgagacggccgccacaggcccgcacccggcagcccgcccgggattcccgaatatgcggaagacccctacgcgatctcatacggcggccagctcgaccggtacggagattccgacggggagccgatttacgacgaggtggcggacgaccaaaccgacgtattgtacgccaagatacaacacccgcggcacctgcccgacgacgatcccatctatgacaccgttggggggtacgaccccgagcccgccgaggaccccgtgtacagcaccgtccgccgttggtagctgtttggttccgttttaataaaccgtttgtgtttaacccgaccgtggtgtatgtctggtgtgtggcgtccgatcccgttactatcaccgtccccccccccccctcaaccccggcgattgtgggttttttaaaaacgacacgcgtgcgaccgtatacagaacattgttttggtttttattcgctatcggacatggggggtggaaactgggtggcggggcaggcgcctccgggggtccgccggtgagtgtggcgcgagggggggtccgatgaacgcaggcgctgtctccccggggcccgcgtaaccccgcgcatatccgggggcacgtagaaattaccttcctcttcggactcgatatccacgacgtcaaagtcgtgggcggtcagcgagacgacctccccgtcgtcggtgatgaggacgttgtttcggcagcagcagggccgggccccggagaacgagaggcccatagctcggcgagcgtgtcgtcgaatgccaggcggctgcttcgctggatggccttatagatctccggatcgatgcggacgggggtaatgatcagggcgatcggaacggcctggttcgggagaatggacgccttgctgggtcctgcggccccgagagccccggcgccgtcctccaggcggaacgttacgccctcctccgcgctggtgcggtgcctgccgataaacgtcaccagatgcgggtggggggggcagtcggggaagtggctgtcgagcacgtagccctgcaccaagatctgcttaaagttcgggtgacgggggttcgcgaagacgggctcgcggcggaccagatccccggagctccaggacacgggggagatggtgtggcgtccgaggtcgggggcgccaaacagaagcacctccgagacaacgccgctatttaactccaccaaggcccgatccgcggcggagcaccgccttttttcgcccgaggcgtgggcctctgaccaggcctggtcttgcgtgacgagagcctcctccgggccggggacgcgcccgggcgcgaagtatcgcacgctgggcttcgggatcgaccggataaatgcccggaacgcctccggggaccggtgtgccatcaagtcctcgtacgcggaggccgtggggtcgctggggtccatggggtcgaaagcgtacttggcccggcatttgacctcgtaaaaggccaggggggtcttggggactggggccaggtagccgtgaatgtcccgaggacagacgagaatatccagggacgccccgaccatccccgtgtgaccgtccatgaggaccccacacgtatgcacgttctcttcggcgaggtcgctgggttcgtggaagataaagcgccgcgtgtcggcgccggcctcgccgccgtcgtccgcgcggcccacgcagtagcgaaacagcaggcttcgggccgtcggctcgttcacccgcccgaacatcaccgccgaagactgtacatccggccgcaggctggcgttgtgcttcagccactggggcgagaaacacggaccctgggggccccagcggagggtggatgcggtcgtgaggccccgccggagcagggcccatagctggcagtcggcctggttttgcgtggccgcctcgtaaaaccccatgaggggccggggcgccacggcgtccgcggcggccgggggcccgcggcgcgtcaggcgccataggtgccgaccgagtccgcggtccaccatacccgcctcctcgaggaccacggccagggaacacagataatccaggcgggcccagaggggaccgatggccagaggggcgcggacgccgcgcagcaacccgcgcaggtggcgctcgaacgtctcggctagtatatgggagggcagcgcgttggggatcaccgacgccgaccacatagagtcaaggtccggggagtcgggatcggcgtccgggtcgcgggcgtgggtgcccccaggagatagcggaatgtctggggtcggaggccctgaggcgtcagaaagtgccggcgacgcggcccggggcttttcgtctgcggtgtcggtggcgtgctgatcacgtggggggttaacgggcgaatgggagctcgggtccacagctgacgtcgtctggggtggggggggcaggggacggaaggtggttgtcagcggaagactgttagggcgggggcgcttgggggggctgtcggggccacgaggggtgtcctcggccagggcccagggacgcttagtcacggtgcgtcccggcggacatgctgggcctaccgtggactccatttccgagacgacgtggggggagcggtggttgagcgcgccgccgggtgaacgctgattctcacgacagcgcgtgccgcgcgcacgggttggtgtgacacaggcgggacaccagcaccaggagaggcttaagctcgggaggcagcgccaccgacgacagtatcgccttgtgtgtgtgctggtaatttatacaccgatccgtaaacgcgcgccgaatcttgggattgcggaggtggcgccggatgccctctgggacgtcatacgccaggccgtgggtgttggtctcggccgagttgacaaacagggctgggtgcagcacgcagcgataggcgagcagggccagggcgaagtccggcgacagctggttgttaaaatactggtaaccgggaaaccgggtcacgggtacgcccaggctcggggcgacgtacacgctaaccaccaactccagcagcgtctggcccagggcgtacaggtcaaccgctaacccgacgtcgtgcttcaggcggtggttggtaaattcggcccgttcgttgttaaggtatttcaccaacagctccgggggctggttatacccgtgacccaccagggtgtgaaagttggctgtggttagggcggtgggcatgccaaacatccggggggacttgaggtccggctcctggaggcaaaactgcccccgggcgatcgtggagttggagttgagggtgacgaggctaaagtcggcgaggacggcccgccggagcgagacggcgtccgaccgcagcatgacgaggatgttggcgcacttgatatccaggtggctgatcccgcaggtggtgtttaaaaacacaacggcgcgggccagctccgtgaagcactggtggagggccgtcgagaccgaggggtttgttgtgcgcagggacgccagttggccgatatacttaccgaggtccatgtcgtacgcggggaacactatctgtcgttgttgcagcgagaacccgaggggcgcgatgaagccgcggatgttgtgggtgcggccggcgcgtagaacgcactccccgaccaacagggtcgcgatgagctcaacggcaaaccactccttttcctttatggtcttaacggcaagcttatgttcgcgaatcagttggacgtcaccgtatcccccagaccccccgaagcttcgggccccggggatctcgagggtcgtgtagtgtagggcggggttgatggcgaacacggggctgcatagcttgcggatgcgcgtgagggtgaggatgtgcgagggggacgaggggggtgcggttaacgccgcctgggatctgcgcaggggcgggcggttcagtttggccgccgtaccgggcgtctcgggggacgcgcggcgatgagacgagcggctcattcgccatcgggatagtcccgcgcgaagccgctcgcggaggccggatcggtggcgggacccgtgggaggagcgggagacggcggcgtcctggagagaggggccgctggggcgcccggaggccccgtgggggttggagtgtacgtaggatgcgagccaatccttgaaggaccgttggcgtgcaccttgggggctgaggttagctgccacatgaccagcaggtcgctgtctgcgggactcatccatccttcggccaggtcgccgtctccccacagagaagcgttggtcgctgcttcctcgagttgctcctcctggtccgcaagacgatcgtccacggcgtccaggcgctcaccaagcgccggatcgaggtaccgtcggtgtgcggttagaaagtcacgacgcgccgcttgctcctccacgcgaattttaacacaggtcgcgcgctgtcgcatcatctctaagcgcgcgcgggactttagccgcgcctccaattccaagtgggccgcctttgcagccataaaggcgccaacaaaccgaggatcttgggtgctgacgccctcccggtgcagctgcagggtctggtccttgtaaatctcggctcggaggtgcgtctcggccaggcgtcggcgcagggccgcgtgggcggcatctcggtccattccgccaccctgcgggcgacccggggggtgctctgatagtctcgcgtgcccaaggcccgtgatcggggtacttcgccgccgcgacccgccacccggtgtgcgcgatgtttggtcagcagctggcgtccgacgtccagcagtacctggagcgcctcgagaaacagaggcaacttaaggtgggcgcggacgaggcgtcggcgggcctcaccatgggcggcgatgccctacgagtgccctttttagatttcgcgaccgcgacccccaagcgccaccagaccgtggtccctggcgtcgggacgctccacgactgctgcgagcactcgccgctcttctcggccgtggcgcggcggctgctgtttaatagcctggtgccggcgcaactaaaggggcgtgatttcgggggcgaccacacggccaagctggaattcctggcccccgagttggtacgggcggtggcgcgactgcggtttaaggagtgcgcgccggcggacgtggtgcctcagcgtaacgcctactatagcgttctgaatacgtttcaggccctccaccgctccgaagcctttcgccagctggtgcactttgtgcgggactttgcccagctgctcaaaacctccttccgggcctccagcctcacggagaccacgggcccccccaaaaaacgggccaaggtggacgtggccacccacggccggacgtacggcacgctggagctgttccaaaaaatgatccttatgcacgccacctactttctggccgccgtgctcctcggggaccacgcggagcaggtcaacacgttcctgcgtctcgtgtttgagatccccctgtttagcgacgcggccgtgcgccacttccgccagcgcgccaccgtgtttctcgtcccccggcgccacggcaagacctggtttctggtgcccctcatcgcgctgtcgctggcctcctttcgggggatcaagatcggctacacggcgcacatccgcaaggcgaccgagccggtgtttgaggagatcgacgcctgcctgcggggctggttcggttcggcccgagtggaccacgttaaaggggaaaccatctccttctcgtttccggacgggtcgcgcagtaccatcgtgtttgcctccagccacaacacaaacgtaagtcctcttttctttcgcatggctctcccaaggggccccgggtcgacccgacccacacccacccacccacatacacacacaaccagacgcgggaggaaagtctgccccgtgggcactgatttttattcgggatcgcttgaggaggcccgggcaacggcccgggcaacggtggggcaactcgtagcaaataggcgactgatgtacgaagagaagacacacaggcgccacccggcgctggtcggggggatgttgtccgcgccgcaccgtcccccgacgacctcttgcagacggtccgtgatgcaaggacggcggggggcctgcagcagggtgaccgtatccacgggatggccaaagagaagcggacacaggctagcatccccctggaccgccagggtacactgggccatcttggcccacagacacggggcgacgcagggacaggactccgttacgacggaggagagccacagtgcgttggcggaatcgatgtggggcggcggggcgcaggactcgcagccccccgggtggttggtgatcctggccaggagccatcccagatggcgggccctgcttcccggtggacagagcgaccccaggtcgctgtccatggcccagcagtagatctggccgctggggaggtgccaccaggcccccgggcccaaggcgcagcacgcgcccggctccgggggggtcttcgcggggaccagatacgcgccatccagctcgccgaccactggctcctccgcgagctgttcggtggttgggtcgggggtttcctccgggggggtggccgcccgtatgcgtgcgaacgtgagggtgcacaggagcggggtcagggggtgcgtcacgctccggaggtggacgatcgcgcagtagcggcgctcgcggttaaagaaaaagagggcaaagaaggtgttcgggggcaaccgcagcgccttggggcgcgtcagatacagaaaaatctcgcagaagagggcgcgcccggggtctgggttaggaagggccacctgacacagaggctcggtgaggaccgttagacaccgaaagatcttgagccgctcgtccgcccgaacgacgcgccacacaaagacggagttgacaatgcgcgcgatagagtcgacgtccgtccccaggtcgtcgactctatcgcgcgtgccgcgagctccggcccgggaatccggccggggcaaggtccccgggggaccaggcggcgccaggggccgccggggtcccagctgcgccatgccgggggcggggggagggcaaaccccagaggcgggggccaacggcgcggggaggagtgggtgggcgaggtggccgggggaaggcgcccgctagcgagaccggccgttcccggacgacaccttgcgacaaaacctaaggacagcggcccgcgcgacggggtccgagaggctaaggtaggccgcgatgttaatggtgaacgcaaagccgccgggaaagacaactatgccacagaggcggcgattaaaccccaggcagaggtaggcgtagctttccccgggcaggtattgctcgcagaccctgcgtggggctgtggaggggacggcctccatgaagcgacatttactctgctcgcgtttactgacgtcaccatccatcgccacggcgattggacgattgttaagccgcagcgtgtctccgcttgtgctgtagtagtcaaaaacgtaatggccgtcggagtcggcaaagcgggccgggaggtcgtcgccgagcgggacgacccgccgcccccgaccgccccgtccccccaggtgtgccaggacggccagggcatacgcggtgtgaaaaaaggcgtcgggggcggtcccctcgacggcgcgcatcaggttctcgaggagaatggggaagcgcctggtcacctcccccaaccacgcgcgttggtcggggccaaagtcatagcgcaggcgctgtgagattcgcgggccgccctgaagcgcggcccggatggcctggcccagggcccggaggcacgccagatgtatgcgcgcggtaaaggcgacctcggcggcgatgtcaaagggcggcaggacggggcgcgggtggcgcaggggcacctcgagcgcgggaaagcgtagcagcagctccgcctgcccagcgggagacagctggtgggggcgcacgacgcgttctgcggcgcaggcctcggtcagggccgtggccagcgccgaggacagcagcggagggcgggcgcgtcgcccgccccacgccacggagttctcgtaggagacgacgacgaagcgctgcttggttccgtagtggtggcgcaggaccacggagatagaacgacggctccacagccagtccggccggtcgccgccggccagggcttcccatccgcgatccaaccactcgaccagcgaccgcggctttgcggtaccaggggtaagggttagaacgtcgttcaggatgtcctcgcccccgggcccgtggggcgctggggccacaaagcggcccccgccggggggctccagacccgccagcaccgcatctgcgtcagccgcccccatggcgcccccgctgacggcctggtgaaccagggcgccctggcgtagccccgatgcaacgccacaggccgcacgcccggtccgcgctcggaccgggtggcggcgggtgacgtcctgcactgcccgctgaaccaacgcgaggatctcctcgttctcctgtgcgatggacacgtcctgggccgcggtcgtgtcgccgccgggggccgtcagctgctcctccggggagatgggggggtcggacgccccgacgatgggcgggtctgcgggcgcccccgcgtggggccgggccaagggctgcggacgcggggacgcgctttcccccagacccatggacaggtgggccgcagcctccttcgcggccggcggggcggcggcgccaagcagagcgacgtagcggcacaaatgccgacagacgcgcatgatgcgcgtgctgtcggccgcgtagcgcgtgttgggggggacgagctcgtcgtaactaaacagaatcacgcgggcacagctcgcccccgagccccacgcaaggcgcagcgccgccacggcgtacgggtcatagacgccctgcgcgtcacacaccacgggcagggagacgaacaaccccccggcgctggacgcacgcggaaggaggccagggtgtgccggcacgacgggggccagaagctcccccaccgcatccgcgggcacgtaggcggcaaacgccgtgcaccacggggtacagtcgccggtggcatgagcccgagtctggatttcgacctggaagtttgcggccgtcccgagtccggggcggccgcgcatcagggcggccagagggattcccgcggccgccaggcactcgctggatatgatgacgtgaaccaaagacgagggccgacccgggccgtggccgagatcgtactggacctcgttggccaagtgcgcgttcatggttcgggggtgggtgtgggtgtgtaggcgatgcgggtcccccgagtccgcgggaagggcgtgggtttggcgcgcgtatgcgtattcgccaacggaggcgtgcgtgcttatgcgcggcgcgtttcttctgtctctagggaatccgaggccaggactttaacctgctctttgtcgacgaggccaactttattcgcccggatgcggtccagacgattatgggctttctcaaccaggccaactgcaagattatcttcgtgtcgtccaccaacaccgggaaggccagtacgagctttttgtacaacctccgcggggccgcagacgagcttctcaacgtggtgacctatatatgcgatgatcacatgccgagggtggtgacgcacacaaacgccacggcctgttcttgttatatcctcaacaagcccgttttcatcacgatggacggggcggttcgccggaccgccgatttgtttctggccgattccttcatgcaggagatcatcgggggccaggccagggagaccggcgacgaccggcccgttctgaccaagtctgcgggggagcggtttctgttgtaccgcccctcgaccaccaccaacagcggcctcatggcccccgatttgtacgtgtacgtggatcccgcgttcacggccaacacccgagcctccgggaccggcgtcgctgtcgtcgggcggtaccgcgacgattatatcatcttcgccctggagcacttttttctccgcgcgctcacgggctcggcccccgccgacatcgcccgctgcgtcgtccacagtctgacgcaggtcctggccctgcatcccggggcgtttcgcggcgtccgggtggcggtcgagggaaatagcagccaggactcggccgtcgccatcgccacgcacgtgcacacagagatgcaccgcctactggcctcggagggggccgacgcgggctcgggccccgagcttctcttctaccactgcgagcctcccgggagcgcggtgctgtacccctttttcctgctcaacaaacagaagacgcccgcctttgaacactttattaaaaagtttaactccgggggcgtcatggcctcccaggagatcgtttccgcgacggtgcgcctgcagaccgacccggtcgagtatctgctcgagcagctaaataacctcaccgaaaccgtctcccccaacactgacgtccgtacgtattccggaaaacggaacggcgcctcggatgaccttatggtcgccgtcattatggccatctacctcgcggcccaggccggacctccgcacacattcgctcctatcacacgcgtctcgtgagcgcccaataaacacacccaggtatgctacgcacgaccacggtgtcgtctgttaaggggggggggggaagggggtgttggcgggaagcgtgggaacacgggggattctctcacgaccggcaccagtaccacccccctgtgaacacagaaaccccaacccaaatcccataaacatacgacacacaggcatattttggaatttcttaggtttttatttatttaggtatgctggggtttctccctggatgcccacccccacccccccgtgggtctagccgggccttagggatagcgtataacgggggccatgtctccggaccgcacaacggccgcgccgtcaaaggtgcacacccgaaccacgggagccagggccaaggtgtctcctagttggcccgcgtgggtcagccaggcgacgagcgcctcgtaaagcggcagccttcgctctccatcctgcatcagggccggggcttcggggtgaatgagctgggcggcctcccgcgtgacactctgcatctgcagtagagcgttcacgtacccgtcctgggcacttagcgcaaagagccgggggattagcgtaaggatgatggtggttccctccgtgatcgagtaaaccatgttaaggaccagcgatcgcagctcggcgtttacgggaccgagttgttggacgtccgccagcagcgagaggcgactcccgttgtagtacagcacgttgaggtctggcagccctccggggtttctggggctggggttcaggtcccggatgcccctggccacgagccgcgccacgatttcgcgcgccaggggcgatggaagcggaacgggaaaccgcaacgtgaggtccagcgaatccaggcgcacgtccgtcgcttggccctcgaacacgggcgggacgaggctgatggggtccccgttacagagatctacgggggaggtgttgcgaaggttaacggtgccggcgtgggtgaggcccacgtccagggggcaggcgacgattcgcgtgggaagcacccgggtgatgaccgcggggaagcgccttcggtacgccagcaacaaccccaacgtgtcgggactgacgcctccggagacgaaggattcgtgcgccacgtcggccagcgtcagttgccggcggatggtcggcaggaataccacccgcccttcgcagcgctgcagcgccgccgcatcggggcgcgagatgcccgagggtatcgcgatgtcagtttcaaagccgtccgccagcatggcgccgatccacgcggcagggagtgcagtggtggttcgggtggcgggaggagcgcggtgggggtcagcggcgtagcagagacgggcgaccaacctcgcataggacggggggtgggtcttagggggttgggaggcgacagggaccccagagcatgcgcggggaggtctgtcgggcccagacgcaccgagagcgaatccgtccgcggagtcccggcttgggttttatggggcccggccctcggaatcgcggcttgtcggcggggacaaagggggcggggctaggggcttgcggaaacagaagacgcgtgggataaaagaatcgcactaccccaaggaagggcggggcggtttattacagagccagtcccttgagcggggatgcgtcatagacgagatactgcgcgaagtgggtctcccgcgcgtgggcttccccgttgcgggcactgcggaggagggcggggtcgctggcgcaggtgagcgggtaggcctcctgaaacaggccacacgggtcctccacgagttcgcggcaccccggggggcgcttaaactgtacgtcgctggcggcggtggccgtggacaccgccgaacccgtctccacgatcaggcgctccaggcagcgatgtttggcggcgatgtcggccgacgtaaagaacttaaagcaggggctgagcaccggcgaggccccgttgaggtggtaggccccgttatagagcaggtccccgtacgaaaatcgctgcgacgcccacgggttggccgtggccgcgaaggcccgggacgggtcgctctggccgtggtcgtacatgagggcggtgacatccccctccttgtcccccgcgtaaacgcccccggcggcgcgtccccgggggttgcagggccggcggaagtagttgacgtcggtcgacacgggggtggcgataaactcacacacggcgtcctggccgtggtccatccctgcgcgccgcggcacctgggcgcacccgaacacggggacgggctgggccggccccaggcggtttcccgccacgaccgcgttccgcaggtacacggctgccgcgttgtccaggagagggggagccccgcggcccaggtaaaagttttggggaaggttgcccatgtcggtgacggggttgcggacggttgccgtggccacgacggcggtgtagcccacgcccaggtccacgttcccgcgcggctgggtgagcgtgaagtttacccccccgccagtttcgtgccgggccacctggagctggcccaggaagtacgcctccgacgcgcgctccgagaacagcacgttctcagtcacaaagcggtcctgtcggacgacggtgaacccaaacccgggatggaggcccgtcttgagctgatgatgcaaggccacgggactgatcttgaagtaccccgccatgagcgcgtaggtcagcgcgttctccccggccgcgctctcgcggacgtgctgcacgacgggctgtcggatcgacgaaaagtagttggcccccagagccggggggaccagggggacctgccgcgacaggtcgcgcagggccggggggaaattgggcgcgttcgccacgtggtcggccccggcgaacagcgcgtggacggggagggggtaaaaatagtcgccattttggatggtatggtccagatgctggggggccatcagcaggattccggcgtgcaacgccccgtcgaatatgcgcatgttggtggtggacgcggtgttggcgcccgcgtcgggcgccgccgagcagagcagcgccgttgtgcgttcggccatgttgtgggccagcacctgcagcgtgagcatggcgggcccgtccactaccacgcgcccgttgtgaaacatggcgttgaccgtgttggccaccagattggccgggtgcagggggtgcgcggggtccgtcacggggtcgctggggcactcctcgccgggggcgatctccgggaccaccatgttctgcagggtggcgtatacgcggtcgaagcgaacccccgcggtgcagcagcggccccgcgagaaggcgggcaccatcacgtagtagtaaatcttgtggtgcacggtccagtccgccccccggtgcggccggtcatccgcggcgtccgcggctcgggcctgggtgttgtgcagcagctggccgtcgttgcggttgaagtccgcggtcgccacgttacatgccgccgcgtacacggggtcgtggccccccgcgctaacccggcagtcgcgatggcggtccagggccgcgcgccgcatcagggcgtcacagtcccacacgaggggtggcagcagcgccgggtctcgcattaggtgattcagctcggcttgcgcctgcccgcccagctccgggccggtcagggtaaagtcatcaaccagctgggccagggcctcgacgtgcgccaccaggtcccggtacacggccatgcactcctcgggaaggtctcccccgaggtaggtcacgacgtacgagaccagcgagtagtcgttcacgaacgccgcgcaccgcgtgttgttccagtagctggtgatgcactggaccacgagccgggccagggcgcagaagacgtgctcgctgccgtgtatggcggcctgcagcaggtaaaacaccgccgggtagttgcggtcgtcgaacgccccgcgaacggcggcgatggtggcgggggccatggcgtggcgtcccacccccagctccaggccccgggcgtcccggaacgccgccggacatagcgccaggggcaagttgccgttcaccacgcgccaggtggcctggatctcccccgggccggccgggggaacgtccccccccggcagctccacgtcggccacccccacaaagaagtcgaacgcggggtgcagctcaagagccaggttggcgttgtcgggctgcataaactgctccggggtcatctggccttccgcgacccatcggacccgcccgtgggccaggcgctgcccccaggcgttcaaaaacagctgctgcatgtctgcggcggggccggccggggccgccacgtacgccccgtacggattggcggcttcgacggggtcgcggttaaggcccccgaccgccgcgtcaacgttcatcagcgaagggtggcacacggtcccgatcgcgtgttccagagacaggcgcagcacctggcggtccttcccccaaaaaaacagctggcggggcgggaaggcgcggggatccgggtggccgggggcggggactaggtccccggcgtgcgcggcaaaccgttccatgaccggattgaacaggcccaggggcaggacgaacgtcaggtccatggcgcccaccagggggtagggaacgttggtggcggcgtagatgcgcttctccagggcctccagaaagaccagcttctcgccgatggacaccagatccgcgcgcacgcgcgtcgtctggggggcgctctcgagctcgtccagcgtctgccggttcaggtcgagctgctcctcctgcatctccagcaggtggcggcccacgtcgtccagacttcgcacggccttgcccatcacgagcgccgtgaccaggttggccccgttcaggaccatctcgccgtacgtcaccggcacgtcggcttcggtgtcctccactttcaggaaggactgcaggaggcgctgtttgatcggggcggtggtgacgagcaccccgtcgaccggccgcccgcgcgtgtcggcatgcgtcagacggggcacggccacggagggctgcgtggccgtggtgaggtccacgagccaggcctcgacggcctcccggcggtggcccgccttgcccaggaaaaagctcgtctcgcagaagcttcgctttagctcggcgaccagggtcgcccgggccaccctggtggccaggcggccgttgtccaggtatcgttgcatcggcaacaacaaagccaggggcggcgccttttccagcagcacgtgcagcatctggtcggccgtgccgcgctcaaacgccccgaggacggcctggacgttgcgagcgagctgttggatggcgcgcaactggcgatgcgcgccgatacccgtcccgtccagggcctcccccgtgagcagggcgatggcctcggtggccaggctgaaggcggcgttcagggcccggcggtcgataatcttggtcatgtaattgtgtgtgggttgctcgatggggtgcgggccgtcgcgggcaatcagcggctggtggacctcgaactgtacgcgcccctcgttcatgtaggccagctccggaaacttggtacacacgcacgccaccgacaacccgagctccagaaagcgcacgagcgacagggtgttgcaatacgaccccagcagggcgtcgaactcgacgtcgtacaggctgtttgcatcggagcgcacgcgggaaaaaaaatcaaacaggcgtcgatgcgacgccacctcgatcgtgctaaggagggacccggtcggcaccatggccgcggcataccggtatcccggagggtcgcggttgggagcggccatggggtcgcgtggagatcggctgtctctagcgatattggcccggggaggctaagatccaccccaacgcccggccacccgtgtacgtgcccgacggcccaaggtccaccgaaagacacgacgggcccggacccaaaaaggcgggggatgctgtgtgagaggccgggtgccggtcgggggggaaaggcaccgggagaaggctgcggcctcgttccaggagaacccagtgtccccaacagacccggggacgtgggatcccaggccttatatacccccccccccgccccacccccgttagaacgcgacgggtgcattcaagatggccctggtccaaaagcgtgccaggaagaaattggcagaggcggcaaagctgtccgccgccgccacccacatcgaggccccggccgcgcaggctatccccagggcccgtgtgcgcaggggatcggtgggcggcagcatttggttggtggcgataaagtggaaaagcccgtccggactgaaggtctcgtgggcggcggcgaacaaggcacacagggccgtgcctcccaaaaacacggacatcccccaaaacacgggcgccgacaacggcagacgatccctcttgatgttaacgtacaggaggagcgcccgcaccgcccacgtaacgtagtagccgacgatggcggccaggatacaggccggcgccaccacccttccggtcagcccgtaatacatgcccgctgccaccatctccaacggcttcaggaccaaaaacgaccaaaggaacagaatcacgcgctttgaaaagaccggctgggtatggggcggaagacgcgagtatgccgaactgacaaaaaaatcagaggtgccgtacgaggacaatgaaaactgttcctccagcggcagttctccctcctcccccccgaaggcggcctcgtcgaccagatctcgatccaccagaggaaggtcatcccgcatggtcatggggtgtgcggtggaggtggggagaccgaaaccgcaaagggtcgcttacgtcagcaggatcccgagatcaaagacacccgggttcttgcacaaacaccacccgggttgcatccgcggaggcgagtgttttgataaggccgttccgcgccttgatataacctttgatgttgaccacaaaacccggaatttacgcctacgccccaatgcccacgcaagatgaggtaggtaacccccccgtgggtgtgacgttgcgtttagttcattggaggccaaggggaaaaatggggtggggaggaaacggaaaacccagtaggccgtgtcgggaacacgcccggggttgtcctcaaaaggcagggtccatactacggaagccgtcgttgtattcgagacctgcctgtgcaacgcacgtcggggttgcctgtgtccggttcggcccccaccgcgtgcggcacgcacgaggacgagtccgcgtgctttattggcgttccaagcgttgccctccagtttctgttgtcggtgttcccccatacccacgcccacatccaccgtagggggcctctgggccgtgttacgtcgccgcccgcgatggagcttagctacgccaccaccatgcactaccgggacgttgtgttttacgtcacaacggaccgaaaccgggcctactttgtgtgcggggggtgtgtttattccgtggggcggccgtgtgcctcgcagcccggggagattgccaagtttggtctggtcgttcgagggacaggcccagacgaccgcgtggtcgccaactatgtacgaagcgagctccgacaacgcggcctgcaggacgtgcgtcccattggggaggacgaggtgtttctggacagcgtgtgtcttctaaacccgaacgtgagctccgagctggatgtgattaacacgaacgacgtggaagtgctggacgaatgtctggccgagtactgcacctcgctgcgaaccagcccgggtgtgctaatatccgggctgcgcgtgcgggcgcaggacagaatcatcgagttgtttgaacacccaacgatagtcaacgtttcctcgcactttgtgtataccccgtccccatacgtgttcgccctggcccaggcgcacctcccccggctcccgagctcgctggaggccctggtgagcggcctgtttgacggcatccccgccccacgccagccacttgacgcccacaacccgcgcacggatgtggttatcacgggccgccgcgccccacgacccatcgccgggtcgggggcggggtcggggggcgcgggcgccaagcgggccaccgtcagcgagttcgtgcaagtcaaacacattgaccgcgtgggccccgctggcgtttcgccggcgcctccgccaaacaacaccgactcgagttccctggtgcccggggcccaggattccgccccgcccggccccacgctaagggagctgtggtgggtgttttatgccgcagaccgggcgctggaggagccccgcgccgactctggcctcacccgcgaggaggtacgtgccgtacgtgggttccgggagcaggcgtggaaactgtttggctccgcgggggccccgcgggcgtttatcggggccgcgttgggcctgagccccctccaaaagctagccgtttactactatatcatccaccgagagaggcgcctgtcccccttccccgcgctagtccggctcgtaggccggtacacacagcgccacggcctgtacgtccctcggcccgacgacccagtcttggccgatgccatcaacgggctgtttcgcgacgcgctggcggccggaaccacagccgagcagctcctcatgttcgaccttctccccccaaaggacgtgccggtgggaagcgacgtgcaggccgacagcaccgctctgctgcgctttatagaatcgcaacgtctcgccgtccccgggggggtgatctcccccgagcacgtcgcgtaccttggtgcgttcctgagcgtgctgtacgctggccgcgggcgcatgtccgcagccacgcacaccgcgcggctgacaggggtgacctccctggtgctagcggtgggtgacgtggaccgtctttccgcgtttgaccgcggagcggcgggcgcggccagccgcacgcgggccgccgggtacctggatgtgcttcttaccgttcgtctcgctcgctcccaacacggacagtctgtgtaaaagaccccaataaacgtatatcgctactacacccttgtgtgtcaatggacgcctctccgggggggggggagggaaagcaaagaggggctgggggagcggcaccaccggggcctgaacaaacaaaccacagacacggttacagtttattcggtcgggcggagaaacggccgaagccacgcccactttattcgcgtctccaaaaaaacgggacacttgtccggagaacctttaggatgccagccagggcggcggtaatcataaccacgcccagcgcagaggcggccagaaacccgggcgcaattgcggccacgggctgcgtgtcaaaggctagcaaatgaatgacggttccgtttggaaatagcaacaaggccgtggacggcacgtcgctcgaaaacacgcttggggcgccctccgtcggcccggcggcgatttgctgctgtgtgttgtccgtatccaccagcaacacagacatgacctccccggccggggtgtagcgcataaacacggcccccacgagccccaggtcgcgctggttttgggtgcgcaccagccgcttggactcgatatcccgggtggagccttcgcatgtcgcggtgaggtaggttaggaacagtgggcgtcggacgtcgacgccggtgagcttgtagccgatcccccggggcagaggggagtgggtgacgacgtagctggcgttgtgggtgatgggtaccaggatccgtggctcgacgttggcagactgccccccgcaccgatgtgaggcctcagggacgaaggcgcggatcagggcgttgtagtgtgcccaacgcgtcagggtcgaggcgaggccgtgggtctgctgggccaggacttcgaccggggtctcggatcgggtggcttgagccagcgcgtccaggataaacacgctctcgtctagatcaaagcgcagggaggccgcgcatggcgaaaagtggtccggaagccaaaagagggttttctggtggtcggcccgggccagcgcggtccggaggtcggcgttggtcgctgcggcgacgtcggacgtacacagggccgaggctatcagaaggctccggcgggcgcgttcccgctgcaccgccgaggggacgccagccaagaacggctgccggaggacagccgaggcgtaaaatagcgcccggtggacgaccggggtggtcagcacgcggccccctagaaactcggcatacagggcgtcgatgagatgggctgcgctgggcgccactgcgtcgtacgccgaggggctatccagcacgaaggccagctgatagcccagcgcgtgtaatgccaagctctgttcgcgctccagaatctcggccaccaggtgctggagccgagcctctagctgcaggcgggccgtgggatccaagactgacacattaaaaaacacagaatccgcggcacagcccgcggccccgcgggcggccaacccggcaagcgcgcgcgagtgggccaaaaagcctagcaggtcggagaggcagaccgcgccgtttgcgtgggcggcgttcacgaaagcaaaacccgacgtcgcgagcagccccgttaggcgccagaagagaggggggcgcgggccctgctcggcgcccgcgtcccccgagaaaaactccgcgtatgcccgcgacaggaactgggcgtagttcgtgccctcctccgggtagccgcccacgcggcggagggcgtccagcgcggagccgttgtcggcccgcgtcagggaccctaggacaaagacccgataccgggggccgcccgggggcccgggaagagcccccggggggttttcgtccgcggggtccccgacccgatctagcgtctggcccgcggggaccaccatcacttccaccggagggctgtcgtgcatggatatcacgagccccatgaattcccgcccgtagcgcgcgcgcaccagcgcggcatcgcacccgagcaccagctcccccgtcgtccagatgcccacgggccacgtcgaggccgacggggagaaatacacgtacctacctggggatctcaacaggccccgggtggccaaccaggtcgtggacgcgttgtgcaggtgcgtgatgtccagctccgtcgtcgggtgccgccgggccccaaccggcggtcgggggggcggtgtatcacgcggcccgctcgggtggctcgccgtcgccacgttgtctccccgcgggaacgtcagggcctcggggtcagggacggccgaaaacgttacccaggcccgggaacgcagcaacacggaggcggctggattgtgcaagagacccttaaggggggcgaccgaggggggaggctgggcggtcggctcgaccgtggtgggggcgggcaggctcgcgttcgggggccggccgagcaggtaggtcttcgggatgtaaagcagctggccggggtcccgcggaaactcggccgtggtgaccaatacaaaacaaaagcgctcctcgtaccagcgaagaaggggcagagatgccgtagtcaggtttagttcgtccggcggcgccagaaatccgcgcggtggtttttgggggtcgggggtgtttggcagccacagacgcccggtgttcgtgtcgcgccagtacatgcggtccatgcccaggccatccaaaaaccatgggtctgtctgctcagtccagtcgtggacctgaccccacgcaacgcccaaaataataacccccacgaaccataaaccattccccatgggggaccccgtccctaacccacggggcccgtggctatggcagggcttgccgccccgacgttggctgcgagccctgggccttcacccgaacttgggggttggggtggggaaaaggaagaaacgcgggcgtattggtcccaatggggtctcggtggggtatcgacagagtgccagccctgggaccgaaccccgcgtttatgaacaaacgacccaacacccgtgcgttttattctgtctttttattgccgtcatagcgcgggttccttccggtattgtctccttccgtgtttcagttagcctcccccatctcccgggcaaacgtgcgcgccaggtcgcagatcgtcggtatggagcctggggtggtgacgtgggtctggaccatcccggaggtaagttgcagcagggcgtcccggcagccggcgggcgattggtcgtaatccaggataaagacgtgcatgggacggaggcgtttggccaagacgtccaaagcccaggcaaacacgttatacaggtcgccgttgggggccagcaactcgggggcccgaaacagggtaaataacgtgtccccgatatggggtcgtgggcccgcgttgctctggggctcggcaccctggggcggcacggccgcccccgaaagctgtccccaatcctcccgccacgacccgccgccctgcagataccgcaccgtattggcaagcagcccataaacgcggcgaatcgcggccagcatagccaggtcaagccgctcgccggggcgctggcgtttggccaggcggtcgatgtgtctgtcctccggaagggcccccaacacgatgtttgtgccgggcaaggtcggcgggatgagggccacgaacgccagcacggcctggggggtcatgctgcccataaggtatcgcgcggccgggtagcacaggagggcggcgatgggatggcggtcgaagatgagggtgagggccgggggcggggcatgtgagctcccagcctcccccccgatatgaggagccagaacggcgtcggtcacggcataaggcatgcccattgttatctgggcgcttgtcattaccaccgccgcgtccccggccgatatctcaccctggtcgaggcggtgttgtgtggtgtagatgttcgcgattgtctcggaagcccccaacacccgccagtaagtcatcggctcgggtacgtagacgatatcgtcgcgcgaacccagggccaccagcagttgcgtggtggtggttttccccatcccgtggggaccgtctatataaacccgcagtagcgtgggcattttctgctccaggcggacttccgtggctttttgctgccggcgagggcgcaacgccgtacgtcggttgttatggccgcgagaacgcgcagcctggtcgaacgcagacgcgtgttgatggcaggggtacgaagccatacgcgcttctacaaggcgctggccgaagaggtgcgggagtttcacgccaccaagatctgcggcacgctgttgacgctgttaagcgggtcgctgcagggtcgctcggtattcgaggccacacgcgtcaccttaatatgcgaagtggacctgggaccgcgccgccccgactgcatctgcgtgttcgaattcgccaatgacaagacgctgggcggggtttgtgtcatcatagaactaaagacatgcaaatatatttcttccggggacaccgccagcaaacgcgagcaacgggccacggggatgaagcagctgcgccactccctgaagctcctgcagtccctcgcgcctccgggtgacaagatagtgtacctgtgccccgtcctggtgtttgtcgcccaacggacgctccgcgtcagccgcgtgacccggctcgtcccgcagaaggtctccggtaatatcaccgcagtcgtgcggatgctccagagcctgtccacgtatacggtccccattgagcctaggacccagcgagcccgtcgccgccgcggcggcgccgcccgggggtctgcgagcagaccgaaaaggtcacactctggggcgcgcgacccgcccgagtcagcggcccgccagttaccacccgccgaccaaacccccgcctccacggagggcgggggggtgcttaagaggatcgcggcgctcttctgcgtgcccgtggccaccaagaccaaaccccgagccgcctccgaatgagagtgtttcgttccttccccctccccccgcgtcagacaaaccctaaccaccgcttaagcggcccccgcgaggtccgaagactcatttggatccggcgggagccacccgacaacagcccccgggttttcccacgccagacgccggtccgctgtgccatcgcgccccctcatcccaccccccatcttgtccccaaataaaacaaggtctggtagttaggacaacgaccgcagttctcgtgtgttattttcgctctccgcctctcgcagatggacccgtactgcccatttgacgctctggacgtctgggaacacaggcgcttcatagtcgccgattcccgaaacttcatcacccccgagttcccccgggacttttggatgtcgcccgtctttaacctcccccgggagacggcggcggagcaggtggtcgtcctacaggcccagcgcacagcggctgccgctgccctggagaacgccgccatgcaggcggccgagctccccgtcgatatcgagcgccggttacgcccgatcgaacggaacgtgcacgagatcgcaggcgccctggaggcgctggagacggcggcggccgccgccgaagaggcggatgccgcgcgcggggatgagccggcgggtgggggcgacgggggggcgcccccgggtctggccgtcgcggagatggaggtccagatcgtgcgcaacgacccgccgctacgatacgacaccaacctccccgtggatctgctacacatggtgtacgcgggccgcggggcgaccggctcgtcgggggtggtgttcgggacctggtaccgcactatccaggaccgcaccatcacggactttcccctgaccacccgcagtgccgactttcgggacggccgtatgtccaagaccttcatgacggcgctggtactgtccctgcaggcgtgcggccggctgtatgtgggccagcgccactattccgccttcgagtgcgccgtgttgtgtctctacctgctgtaccgaaacacgcacggggccgccgacgatagcgaccgcgctccggtcacgttcggggatctgctgggccggctgccccgctacctggcgtgcctggccgcggtgatcgggaccgagggcggccggccacagtaccgctaccgcgacgacaagctccccaagacgcagttcgcggccggcgggggccgctacgaacacggagcgctggcgtcgcacatcgtgatcgccacgctgatgcaccacggggtgctcccggcggccccgggggacgtcccccgggacgcgagtacccacgttaaccccgacggcgtggcgcaccacgacgacataaaccgcgccgccgccgcgttcctcagccggggccacaacctattcctgtgggaggaccagactctgctgcgggcaaccgcgaacaccataacggccctgggcgttatccagcggctcctcgcgaacggcaacgtgtacgcggaccgcctcaacaaccgcctgcagctgggcatgctgatccccggagccgtcccttcggaggccatcgcccgtggggcctccgggtccgactcgggggccatcaagagcggagacaacaatctggaggcgctatgtgccaattacgtgcttccgctgtaccgggccgacccggcggtcgagctgacccagctgtttcccggcctggccgccctgtgtcttgacgcccaggcggggcggccggtcgggtcgacgcggcgggtggtggatatgtcatcgggggcccgccaggcggcgctggtgcgcctcaccgccctggaactcatcaaccgcacccgcacaaaccccacccctgtgggggaggttatccacgcccacgacgccctggcgatccaatacgaacaggggcttggcctgctggcgcagcaggcacgcattggcttgggctccaacaccaagcgtttctccgcgttcaacgttagcagcgactacgacatgttgtactttttatgtctggggttcattccacagtacctgtcggcggtttagtgggtggtgggcgaggggggagggggcattagggagaaagaacaagagcctccgttgggttttctttgtgcctgtactcaaaaggtcataccccgtaaacggcgggctccagtcccggcccggcggttggcgtgaacgcaacggcgggagctgggttagcgtttagtttagcattcgctctcgcctttccgcccgccccccgaccgttgcgcctttttttttttcgtccaccaaagtctctgtgggtgcgcgcatggcagccgatgccccgggagaccggatggaggagcccctgcccgacagggccgtgcccatttacgtggctgggtttttggccctgtatgacagcggggactcgggcgagttggcattggatccggatacggtgcgggcggccctgcctccggataacccactcccgattaacgtggaccaccgcgctggctgcgaggtggggcgggtgctggccgtggtcgacgacccccgcgggccgttttttgtggggctgatcgcctgcgtgcagctggagcgcgtcctcgagacggccgccagcgctgcgattttcgagcgccgcgggccgccgctctcccgggaggagcgcctgttgtacctgatcaccaactacctgccctcggtctccctggccacaaaacgcctggggggcgaggcgcaccccgatcgcacgctgttcgcgcacgtcgcgctgtgcgcgatcgggcggcgcctcggcactatcgtcacctacgacaccggtctcgacgccgccatcgcgccctttcgccacctgtcgccggcgtctcgcgagggggcgcggcgactggccgccgaggccgagctcgcgctgtccgggcgcacctgggcgcccggcgtggaggcgctgacccacacgctgctttccaccgccgttaacaacatgatgctgcgggaccgctggagcctggtggccgagcggcggcggcaggccgggatcgccggacacacctacctccaggcgagcgaaaaattcaaaatgtggggggcggagcctgtttccgcgccggcgcgcgggtataagaacggggccccggagtccacggacataccgcccggctcgatcgctgccgcgccgcagggtgaccggtgcccaatcgtccgtcagcgcggggtcgccttgtccccggtactgccccccatgaaccccgttccgacatcgggcaccccggcccccgcgccgcccggcgacgggagctacctgtggatcccggcctcccattacaaccagctcgtcgccggccatgccgcgccccaaccccagccgcattccgcgtttggtttcccggctgcggcggggtccgtggcctatgggcctcacggtgcgggtctttcccagcattaccctccccacgtcgcccatcagtatcccggggtgctgttctcgggacccagcccactcgaggcgcagatagccgcgttggtgggggccatagccgcggaccgccaggcgggcggtcagccggccgcgggagaccctggggtccgggggtcgggaaagcgtcgccggtacgaggcggggccgtcggagtcctactgcgaccaggacgaaccggacgcggactacccgtactaccccggggaggctcgaggcgggccgcgcggggtcgactcccggcgcgcggcccgccattctcccgggaccaacgagaccatcacggcgctgatgggggcggtgacgtctctgcagcaggaactggcgcacatgcgggctcggaccagcgccccctatggaatgtacacgccggtggcgcactatcgccctcaggtgggggagccggaaccaacaacgacccacccggccctttgtcccccggaggccgtgtatcgccccccaccacacagcgccccctacggtcctccccagggtccggcgtcccatgcccccactcccccgtatgccccagctgcctgcccgccaggcccgccaccgcccccatgtccttccacccagacgcgcgcccctctaccgacggagcccgcgttcccccccgccgccaccggatcccaaccggaggcatccaacgcggaggccggggcccttgtcaacgccagcagcgcagcacacgtggacgttgacacggcccgcgccgccgatttgttcgtctctcagatgatgggggcccgctgattcgccccggtctttggtaccatgggatgtcttactgtatatctttttaaataaaccaggtaataccaaataagacccattggtgtatgttctttttttattgggaggcgcgggtaggcgggtagctttacaatgcaaaagccttcgacgtggaggaaggcgtggggggggggggaatcggcactgaccaagggggtccgttttgtcacgggaaaggaaagaggaaacaggccgcggacacccgggggagtttgtgttcccttttctttcttcccacacacacaaaaggcgtaccaaacaaacaaaccaaaagatgcacatgcggtttaacacccgtggtttttatttacaacaaaccccccatcacaggtcgtcctcgtcggcgtcaccgtctttgttgggaacttgggtgtagttggtgttgcggcgcttgcgcatgaccatgtcggtgaccttggcgctgagcagcgcgctcgtgcccttcttcttggccttgtgttccgtgcgctccatggcagacaccagggccatgtaccgtatcatctcccgggcctcggctagcttggcctcgtcaaagtcgccgccctcctcgccctccccggacgcgtccgggttggtggggttcttgagctccttggtggttagcgggtacagggccttcatggggttgctctgcagccgcatgacgtagcgaaaggcgaagaaggccgccgccaggccggccaggaccaacagacccacggccagcgccccaaaggggttggacatgaaggaggacacgcccgacacggccgataccacgccgcccacgatgcccatcaccaccttgccgaccgcgcgccccaggtcgcccatcccctcgaagaacgcgcccaggcccgcaaacatggcggcgttggcgtcggcgtggatgaccgtgtcgatgtcggcgaagcgcaggtcgtgcagctggttgcggcgctggacctccgtgtagtccagcaggccgctgtccttgatctcgtggcgggtgtacacctccagggggacaaactcgtgatcctccagcatggtgatgttgaggtcgatgaaggtgctgacggtggtgatgtcggcgcggctcagctggtgggagtacgcgtactcctcgaagtacacgtagcccccaccgaaggtgaagtagcgccggtgtcccacggtgcacggctcgatcgcatcgcgcgtcagccgcagctcgttgttctcccccagctgcccctcgaccaacgggccctggtcttcgtaccgaaagctgaccagggggcggctgtagcaggccccgggccgcgagctgatgcgcatcgagttttggacgatcacgttgtccgcggcgaccggcacgcacgtggagacggccatcacgtcgccgagcatccgcgcgctcacccgccggcccacggtggccgaggcgatggcgttggggttcagcttgcgggcctcgttccacagggtcagctcgtgattctgcagctcgcaccacgcgatggcaacgcggcccaacatatcgttgacatggcgctgtatgtggttgtacgtaaactgcagcctggcgaactcgatggaggaggtggtcttgatgcgctccacggacgcgttggcgctggccccgggcggcgggggcgtggggtttgggggcttgcggctctgctcgcggaggtgttcccgcacgtacagctccgcgagcgtgttgctgagaaggggctggtacgcgatcagaaagcccccattggccaggtagtactgcggctggcccaccttgatgtgcgtcgcgttgtacctgcgggcgaagatgcggtccatggcgtcgcgggcgtccttgccgatgcagtcccccaggtccacgcgcgagagcgggtactcggtcaggttggtggtgaaggtggtggatatggcgtcggaagagaatcggaaggagccgccgtactcggagcgcagcatctcgtccacctcctgccacttggtcatggtgcagaccgacgggcgctttggcacccagtcccaggccacggtgaacttgggggtcgtgagcaggttccgggtggtcggcgccgtggcccgggccttggtggtgaggtcgcgcgcgtagaagccgtcgacctgcttgaagcggtcggcggcgtagctggtgtgttcggtgtgcgacccctcccggtagccgtaaaacggggacatgtacacaaagtcgccagtcgccaacacaaactcgtcgtacgggtacaccgagcgcgcgtccacctcctcgacgatgcagtttaccgtcgtcccgtaccggtggaacgcctccacccgcgaggggttgtacttgaggtcggtggtgtgccagccccggctcgtgcgggtcgcggcgttggccggtttcagctccatgtcggtctcgtggtcgtcccggtgaaacgcggtggtctccaggttgttgcgcacgtacttggccgtggaccgacagacccccttggcgttgatcttgtcgatcacctcctcgaaggggacgggggcgcggtcctcaaagatccccataaactgggagtagcggtggccgaaccacacctgcgaaacggtgacgtctttgtagtacatggtggccttgaacttgtacggggcgatgttctccttgaagaccaccgcgatgccctccgtgtagttctgaccctcgggccgggtcgggcagcggcgcggctgctcgaactgcaccaccgtggcgcccgtggggggtgggcacacgtaaaagtttgcatcggtgttctccgccttgatgtcccgcaggtgctcgcgcagggtggcgtggcccgcggcgacggtcgcgttgtcgccggcggggcgcggcggctttgggggtttcggttttttgttcttcttcggtttcgggtcccccgttgggggggcgccaggggcgggcggcgccggagtggcagggcccccgttcgccgcctgggtcgcggccgcgaccccaggcgtgccgggggaactcggagccgccgacgccaccaggacccccagcgtcaaccccaagagcgcccatacgacgaaccaccggcgcccccgcgcgggggcgccctggcgcatggcgggactacgggggcccgtcgtgccccccgtcaggtagcctgggggcgaggtgctggaggaccgagtagaggatcgagaaaacgtctcggtcgtagaccacgaccgaccgggggccgatacagccgtcgggggcgctctcgacgatggccaccagcggacagtcggagtcgtacgtgagatatacgccgggcgggtaacggtaacgaccttcggaggtcgggcggctgcagtccgggcggcgcaactcgagctccccgcaccggtagaccgaggcaaagagtgtggtggcgataatcagctcgcgaatatatcgccaggcggcgcgctgagtgggcgttattccggaaatgccgtcaaaacagtaaaacctctgaaattcgctgacggcccaatcagcacccgagccccccgcccccatgatgaaccgggcgagctcctccttcaggtgcggcaggagccccacgttctcgacgctgtaatacagcgcggtgttggggggctgggcgaagctgtgggtggagtgatcaaagaggggcccgttgacgagctcgaagaagcgatgggtgatgctggggagcagggccgggtccacctggtgtcgcaggagagacgctcgcatgaaccggtgcgcgtcgaacacgcccggcgccgagcggttgtcgatgaccgtgcccgcgcccgccgtcagggcgcagaagcgcgcgcgcgccgcaaagccgttggcgaccgcggcgaacgtcgcgggcagcacctcgccgtggacgctgacccgcagcatcttctcgagctccccgcgctgctcgcggacgcagcgccccaggctggccaacgaccgcttcgtcaggcggtccgcgtacagccgccgtcgctcccgcacgtccgcggccgcttgcgtggcgatgtccccccacgtctcgggcccctgccccccgggcccgcggcgacggtcttcgtcctcgcccccgcccccgggagctcccaacccccgtgccccttcctctacggcgacacggtccccgtcgtcgtcggggcccgcgccgcccttgggcgcgtccgccgcgccccccgcccccatgcgcgccagcacgcgacgcagcgcctcctcgtcgcactgttcggggctgacgaggcgccgcaagagcggcgtcgtcaggtggtggtcgtagcacgcgcggatgagcgcctcgatctgatcgtcgggtgacgtggcctgaccgccgattattagggcgtccaccatatccagcgccgccaggtggctcccgaacgcgcgatcgaaatgctccgcccgccgcccgaacagcgccagttccacggccaccgcggcggtctcctgctgcaactcgcgccgcgccagcgcggtcaggttgctggcaaacgcgtccatggtggtctggccggcgcggtcgccggacgcgagccagaatcgcaattcgctgatggcgtacaggccgggcgtggtggcctgaaacacgtcgtgcgcctccagcagggcgtcggcctccttgcggaccgagtcgttctcgggcgacgggtggggctgcccgtcgccccccgcggtccgggccagcgcatggtccaacacggagagcgcccgcgcgcggtcggcgtccgacagcccggcggcgtggggcaggtaccgccgcagctcgttggcgtccagccgcacctgcgcctgctgggtgacgtggttacagatacggtccgccaggcggcgggcgatcgtcgccccctggttcgccgtcacacacagttcctcgaaacagaccgcgcaggggtgggacgggtcgctaagctccggggggacgataaggcccgaccccaccgcccccaccataaactcccgaacgcgctccagcgcggcggtggcgccgcgcgagggggtgatgaggtggcagtagtttagctgctttagaaagttctcgacgtcgtgcaggaaacacagctccatatggacggtcccgccatacgtatccagcctgacccgttggtgatacggacagggtcgggccaggcccatggtctccgtgaaaaacgccgcgacgtctcccgcggtcgcgaacgtctccaggctgcccaggagccgctcgccctcgcgccacgcgtactctagcagcaactccagggtgaccgacagcggggtgagaaaggccccggcctgggcctccaggcccggcctcagacgacgccgcagcgcccgcacctgaagcgcgttcagcttcagttgggggagcttcccccgtccgatgtgggggtcgcaccgccggagcagctctatctgaaacacataggtctgcacctgcccgagcagggctaacaacttttgacgggccacggtgggctcggacaccggggcggccatctcgcggcgccgatctgtaccgcggccggagtatgcggtggaccgaggcggtccgtacgctacccggcgtctggctgagccccggggtccccctcttcggggcggcctcccgcgggcccgccgaccggcaagccgggagtcggcggcgcgtgcgtttctgctctattcccagacaccgcggagaggaatcacggcccgcccagagatatagacacggaacacaaacaagcacggatgtcgtagcaataatttattttacacacattccccgccccgccctaggttcccccaccccccaacccctcacagcatatccaacgtcaggtctccctttttgtcggggggcccctccccaaacgggtcatccccgtggaacgcccgtttgcggccggcaaatgccggtcccggggcccccgggccgccgaacggcgtcgcgttgtcgtcctcgcagccaaaatccccaaagttaaacacctccccggcgttgccgagttggctgactagggcctcggcctcgtgcgccacctccagggccgcgtccgtcgaccactcgccgttgccgcgctccagggcacgcgcggtcagctccatcatctcctcgcttaggtactcgtcctccaggagcgccagccagtcctcgatctgcagctgctgggtgcggggccccaggcttttcacggtcgccacgaacacgctactggcgacggccgccccgccctcggagataatgccccggagctgctcgcacagcgagctttcgtgcgctccgccgccgaggcttgaggccgcgcacacaaacccggcccggggacaggccaggacgaacttgcgggtgcggtcaaaaataaggagcgggcacgcgtttttgccgcccatcaggctggcccagttcccggcctgaaacacacggtcgttgccggccatgccgtagtacttgctgatgctcaaccccaacacgaccatggggcgcgccgccatgacgggccgcagcaggttgcagctggcgaacatggacgtccacgcgcccggatgcgcgtccacggcgtccatcagcgcgcgggccccggcctccaggcccgccccgccctgcgcggaccacgcggccgcagcctgcacgctggggggacggcgggaccccgcgatgatggccgtaagggtgttgatgaagtatgtcgagtgatcgcagtaccgcagaatctggtttgccatgtagtacatcgccagctcgctcacgttgttgggggccaggttaataaagtttatcgcgccgtagtccagggaaaactttttaatgaacgcgatggtctcgatgtcctcgcgcgacaggagccgggcgggaagctggttgcgttggagggccgtccagaaccactgcgggttcggctggttggaccccgggggcttgccgttggggaagatggccgcgtggaactgcttcagcagaaagcccagcggtccgaggaggatgtccacgcgcttgtcgggcttctggtaggcgctctggaggctggcgacccgcgccttggcggcctcggacgcgttggcgctcgcgcccgcgaacaacacgcggctcttgacgcgcagctccttgggaaaccccagggtcacgcgggcaacgtcgccctcgaagctgctctcggcgggggccgtctggccggccgttaggctgggggcgcagatagccgccccctccgagagcgcgaccgtcagcgttttggccgacagaaacccgttgttaaacatgtccatcacgcgccgccgcagcaccggttggaattgattgcgaaagttgcgcccctcgaccgactgcccggcgaacaccccgtggcactgactcagggccaggtcctggtacacggcgaggttggatcgccgcccgagaagctgaagcagggggcacggcccgcacgcgtacgggtccagcgtcagggacatggcgtggttggcctcgcccagaccgtcgcgaaacttgaagttcctcccctccaccaggttgcgcatcagctgctccacctcgcggtccacgacctgcctgacgttgttcaccaccgtatgcagggcctcgcggttggtgatgatggtctccagccgccccatggccgtggggaccgcctggtccacgtactgcagggtctcgagttcggccatgacgcgctcggtcgccgcgcggtacgtctcctgcatgatggtccgggcggtctcggatccgtccgcgcgcttcagggccgagaaggcggcgtagtttcccagcacgtcgcagtcgctgtacatgctgttcatggtcccgaagacgccgatggctccgcgggcggcgctggcgaactttggatggcgcgcccggaggcgcatgagcgtcgtgtgtacgcaggcgtggcgcgtgtcgaaggtgcataggttacagggcacgtcggtctggttggagtccgcgacgtatcgaaacacgtccatctcctggcgcccgacgatcacgccgccgtcgcagcgctccaggtaaaacagcatcttggccagcagcgccggggaaaacccacacagcatggccaggtgctcgccggcaaattcctgggttccgccgacgaggggcgcggtgggccgaccctcgaacccgggcaccacgtgtccctcgcggtccacctgtgggttggccgccacgtgggtcccgggcacgaggaagaagcggtaaaaggagggtttgctgtggtcctttgggtccgccgggccggcgtcgtccacctcggtgagatggagggccgagttggtgctaaataccatggcccccacgagtcccgcggcgcgcgccaggtacgccccgacggcgttggcgcgggccgcggccgtgtcctggccctcgaacagcggccacgcggagatgtcggtgggcggctcgtcaaagacggccatcgacacgatagactcgagggccagggcggcgtctccggccatgacggaggccaggcgctgttcgaacccgcccgccgggcccttgccgccgccgtcgcgcccgccccgcggggtcttaccctggctggcttcgaaggccgtgaacgtaatgtcggcggggagggcggcgccctcgtggttttcgtcaaacgccaggtgggcggccgcgcgggccacggcgtccacgtttcggcatcgcagtgccacggcggcgggtcccacgaccgcctcgaacaggaggcggttgagggggcggttaaaaaacggaagcgggtaggtaaaattctccccgatcgatcggtggttggcgttgaacggctctgcgatgacacggctaaaatccggcatgaacagctgcaacgggtacacgggtatgcggtgcacctccgccccgcctatggttaccttgtccgagcctcccaggtgcagaaaggtgttgttgatgcacacggcctccttgaagccctcggtaacgaccagatacaggagggcgcggtccgggtccaggccgaggcgctcacacagcgcctcccccgtcgtctcgtgtttgaggtcgccgggccggggggtgtagtccgaaaagccaaaatggcggcgtgcccgctcgcaaagtcgcgtcaggttcggggcctgggtgctggggtccaggtgccggccgccgtgaaagacgtacacggacgagctgtagtgcgagggcgtcagtttcagggacaccgcggtacccccgagccccgtcgtgcgagaacccacgaccacggccacgttggcctcaaagccgctctccacggtcaggcccacgaccaggggcgccacggcgacgtcggaatcgccgctgcgtgccgacagtaacgccagaagctcgatgccttcggacggacacgcgcgagcgtacacgtatcccaggggcccgggggggaccttgatggtggttgccgtcttgggctttgtctccatgtccttttgtcaatcggtccgcgaacggaggtaatcccggcacgacgacggacgcccgacaaggtatgtctcccgagcgtcaaaatccgggggggggcggcgacggtcaaggggagggttggagaccggggttggggaatgaatccctccccttcaccgacaaccccccgggtaaccacggggtgccgatgaaccccggcggccggcaacgcggggtccctgcgagaggcacagatgcttacggtcaggtgctccgggtcgggtgcgtctggtatgcggttggtatatgtacactttacctgggggcgtgccggtccgccccagcccctcccacgccccgcgcgtcatcagccggtgggcgtggccgctattataaaaaaagtgagaacgcgaagcgttcgcactttgtcctaataatatatatattattaggacaaagtgcgaacgcttcgcgttctcactttttttataatagcggccacgcccaccggctacgtcactctcctgtcggccgccggcggtccataagcccggccggccgggccgacgcgaataaaccgggccgccggccggggcgccgcgcagcagctcgccgcccggatccgccagacaaacaaggcccttgcacatgccggcccgggcgagcctgggggtccggtaattttgccatcccacccaagcggctttttgggtttttctcttcccccctccccacattcccctctttaggggttcgggtgggaacaaccgcgatgttttccggtggcggcggcccgctgtcccccggaggaaagtcggcggccagggcggcgtccgggttttttgcgcccgccggccctcgcggagccagccggggacccccgccttgtttgaggcaaaacttttacaacccctacctcgccccagtcgggacgcaacagaagccgaccgggccaacccagcgccatacgtactatagcgaatgcgatgaatttcgattcatcgccccgcgggtgctggacgaggatgcccccccggagaagcgcgccggggtgcacgacggtcacctcaagcgcgcccccaaggtgtactgcgggggggacgagcgcgacgtcctccgcgtcgggtcgggcggcttctggccgcggcgctcgcgcctgtggggcggcgtggaccacgccccggcggggttcaaccccaccgtcaccgtctttcacgtgtacgacatcctggagaacgtggagcacgcgtacggcatgcgcgcggcccagttccacgcgcggtttatggacgccatcacaccgacggggaccgtcatcacgctcctgggcctgactccggaaggccaccgggtggccgttcacgtttacggcacgcggcagtacttttacatgaacaaggaggaggtcgacaggcacctacaatgccgcgccccacgagatctctgcgagcgcatggccgcggccctgcgcgagtccccgggcgcgtcgttccgcggcatctccgcggaccacttcgaggcggaggtggtggagcgcaccgacgtgtactactacgagacgcgccccgctctgttttaccgcgtctacgtccgaagcgggcgcgtgctgtcgtacctgtgcgacaacttctgcccggccatcaagaagtacgagggtggggtcgacgccaccacccggttcatcctggacaaccccgggttcgtcaccttcggctggtaccgtctcaaaccgggccggaacaacacgctagcccagccgcgggccccgatggccttcgggacatccagcgacgtcgagtttaactgtacggcggacaacctggccatcgaggggggcatgagcgacctaccggcatacaagctcatgtgcttcgatatcgaatgcaaggcggggggggaggacgagctggcctttccggtggccgggcacccggaggacctggtcatccagatatcctgtctgctctacgacctgtccaccaccgccctggagcacgtcctcctgttttcgctcggttcctgcgacctccccgaatcccacctgaacgagctggcggccaggggcctgcccacgcccgtggttctggaattcgacagcgaattcgagatgctgttggccttcatgacccttgtgaaacagtacggccccgagttcgtgaccgggtacaacatcatcaacttcgactggcccttcttgctggccaagctgacggacatttacaaggtccccctggacgggtacggccgcatgaacggccggggcgtgtttcgcgtgtgggacataggccagagccacttccagaagcgcagcaagataaaggtgaacggcatggtgaacatcgacatgtacgggattataaccgacaagatcaagctctcgagctacaagctcaacgccgtggccgaagccgtcctgaaggacaagaagaaggacctgagctatcgcgacatccccgcctactacgccgccgggcccgcgcaacgcggggtgatcggcgagtactgcatacaggattccctgctggtgggccagctgttttttaagtttttgccccatctggagctctcggccgtcgcgcgcttggcgggtattaacatcacccgcaccatctacgacggccagcagatccgcgtctttacgtgcctgctgcgcctggccgaccagaagggctttattctgccggacacccaggggcgatttaggggcgccgggggggaggcgcccaagcgtccggccgcagcccgggaggacgaggagcggccagaggaggagggggaggacgaggacgaacgcgaggagggcgggggcgagcgggagccggagggcgcgcgggagaccgccggcaggcacgtggggtaccagggggccagggtccttgaccccacttccgggtttcacgtgaaccccgtggtggtgttcgactttgccagcctgtaccccagcatcatccaggcccacaacctgtgcttcagcacgctctccctgagggccgacgcagtggcgcacctggaggcgggcaaggactacctggagatcgaggtgggggggcgacggctgttcttcgtcaaggctcacgtgcgagagagcctcctcagcatcctcctgcgggactggctcgccatgcgaaagcagatccgctcgcggattccccagagcagccccgaggaggccgtgctcctggacaagcagcaggccgccatcaaggtcgtgtgtaactcggtgtacgggttcacgggagtgcagcacggactcctgccgtgcctgcacgttgccgcgacggtgacgaccatcggccgcgagatgctgctcgcgacccgcgagtacgtccacgcgcgctgggcggccttcgaacagctcctggccgatttcccggaggcggccgacatgcgcgcccccgggccctattccatgcgcatcatctacggggacacggactccatctttgtgctgtgccgcggcctcacggccgccgggctgacggccgtgggcgacaagatggcgagccacatctcgcgcgcgctgtttctgccccccatcaaactcgagtgcgaaaagacgttcaccaagctgctgctgatcgccaagaaaaagtacatcggcgtcatctacgggggtaagatgctcatcaagggcgtggatctggtgcgcaaaaacaactgcgcgtttatcaaccgcacctccagggccctggtcgacctgctgttttacgacgataccgtctccggagcggccgccgcgttagccgagcgccccgcggaggagtggctggcgcgacccctgcccgagggactgcaggcgttcggggccgtcctcgtagacgcccatcggcgcatcaccgacccggagagggacatccaggactttgtcctcaccgccgaactgagcagacacccgcgcgcgtacaccaacaagcgcctggcccacctgacggtgtattacaagctcatggcccgccgcgcgcaggtcccgtccatcaaggaccggatcccgtacgtgatcgtggcccagacccgcgaggtagaggagacggtcgcgcggctggccgccctccgcgagctagacgccgccgccccaggggacgagcccgccccccccgcggccctgccctccccggccaagcgcccccgggagacgccgtcgcctgccgaccccccgggaggcgcgtccaagccccgcaagctgctggtgtccgagctggccgaggatcccgcatacgccattgcccacggcgtcgccctgaacacggactattacttctcccacctgttgggggcggcgtgcgtgacattcaaggccctgtttgggaataacgccaagatcaccgagagtctgttaaaaaggtttattcccgaagtgtggcaccccccggacgacgtggccgcgcggctccggaccgcagggttcggggcggtgggtgccggcgctacggcggaggaaactcgtcgaatgttgcatagagcctttgatactctagcatgagccccccgtcgaagctgatgtccctcattttacaataaatgtctgcggccgacacggtcggaatctccgcgtccgtgggtttctctgcgttgcgccggaccacgagcacaaacgtgctctgccacacgtgggcgacgaaccggtaccccgggcacgcggtgagcatccggtctatgagccggtagtgcaggtgggcggacgtgccgggaaagatgacgtacagcatgtggcccccgtaagtggggtccgggtaaaacaacagccgcgggtcgcacgccccgcctccgcgcaggatcgtgtggacgaaaaaaagctcgggttggccaagaatcccggccaagaggtcctggaggggggcgttgtggcggtcggccaacacgaccaaggaggccaggaaggcgcgatgctcgaatatcgtgttgatctgctgcacgaaggccaggattagggcctcgcggctggtggcggcgaaccgcccgtctcccgcgttgcacgcgggacagcaacccccgatgcctaggtagtagcccatcccggagagggtcaggcagttgtcggccacggtctggtccagacagaagggcagcgagacgggagtggtcttcaccaggggcaccgagagcgagcgcacgatggcgatctcctcggagggcgtctgggcgagggcggcgaaaaggccccgatagcgctggcgctcgtgtaaacacagctcctgtttgcgggcgtgaggcggcaggctcttccgggaggcccgacgcaccacgcccagagtcccgccggccgcagaggagcgcgaccgccggcgctccttgccgtgatagggcccgggccgggagccgcggcgatgggggtcggtgtcatacataggtacacagggtgtgctccagggacaggagcgagatcgagtggcgtctaagcagcgcgcccgcctcacggacaaatgtggcgagcgcggtgggctttggtacaaatacctgatacgtcttgaaggtgtagatgagggcacgcaacgctatgcagacacgcccctcgaactcgttcccgcaggccagcttggccttgtggagcagcagctcgtcgggatgggtggcggggggatggccgaacagaacccaggggtcaacctccatctccgtaatggcgcacatggggtcacagaacatgtgcttaaagatggcctcgggccccgcggcccgaagcaggctcacaaaccggcccccgtccccgggctgcgtctcggggtcagcctcgagctggtcgacgacgggtacgatacagtcgaagaggctcgtgttgttttccgagtagcggaccacggaggcccggagtctgcgcagggccagccagtaagcacgcaccagtaacaggttacacagcaggcattctccgccggtgcgcccgcgcccccggccgtgtttcagcacggtggccatcagagggcccaggtcgaggtcgggctgggcatcgggttcggtaaactgcgcaaagcgcggagccacgtcgcgcgtgcgtgccccgcgatgcgcttcccaggactggcggaccgtggcgcgacgggcctccgcggcagcgcgcagctggggccccgactcccagacggcgggggtgccggcgaggagcaacaggaccagatccgcgtacgcccacgtatccggcgactcctccggctcgcggtccccggcgaccgtctcgaattccccgttgcgagcggcggcgcgagtacagcagctgtccccgcccccgcgccgaccctccgtgcagtccaggagacgggcgcaatccttccagttcatcagcgcggtggtgagcgacggctgcgtgccggatcccgccgccgaccccgccccctcctcgcccccggaggccaaggttccgatgagggcccgggtggcagactgcgccaggaacgagtagttggagtactgcaccttggcggctcccggggagggcgagggcttgggttgcttctgggcatgccgcccgggcaccccgccgtcggtacggaagcagcagtggagaaaaaagtgccggtggatgtcgtttatggtgagggcaaagcgtgcgaaggagccgaccagggtcgccttcttggtgcgcagaaagtggcggtccatgacgtacacaaactcgaacgcggccacgaagatgctagcggcgcagtggggcgcccccaggcatttggcacagagaaacgcgtaatcggccacccactgaggcgagaggcggtaggtttgcttgtacagctcgatggtgcggcagaccagacagggccggtccagcgcgaaggtgtcgatggccgccgcggaaaagggcccggtgtccaaaagcccctccccacagggatccgggggcgggttgcggggtcctccgcgcccgcccgaaccccctccgtcgcccgcccccccgcgggcccttgagggggcggtgaccacgtcggcggcgacgtcctcgtcgagcgtaccgacgggcggcacacctatcacgtgactggccgtcaggagctcggcgcagagagcctcgttaagagccaggaggctgggatcgaaggccacatacgcgcgctcgaacgcccccgccttccagctgctgccgggggactcttcgcacaccgcgacgctcgccaggaccccggggggcgaagttgccatggctgggcgggaggggcgcacgcgccagcgaactttacgggacacaatccccgactgcgcgctgcggtcccagaccctggagagtctagacgcgcgctacgtctcgcgagacggcgcgcatgacgcggccgtctggttcgaggatatgacccccgccgagctggaggttgtcttcccgactacggacgccaagctgaactacctgtcgcggacgcagcggctggcctccctcctgacgtacgccgggcctataaaagcgcccgacgacgccgccgccccgcagaccccggacaccgcgtgtgtgcacggcgagctgctcgcccgcaagcgggaaagattcgcggcggtcattaaccggttcctggacctgcaccagattctgcggggctgacgcgcgtgctgttgggcgggacggttcgcgaaccctttggtgggtttacgcgggcacgcacgctcccatcgcgggcgccatggcgggactgggcaagccctacaccggccacccaggtgacgccttcgagggtctcgttcagcgaattcggcttatcgtcccatctacgttgcggggcggggacggggaggcgggcccctactctccctccagcctcccctccaggtgcgcctttcagtttcatggccatgacgggtccgacgagtcgtttcccatcgagtatgtactgcggcttatgaacgactgggccgaggtcccgtgcaacccttacctgcgcatacagaacaccggcgtgtcggtgctgtttcaggggttttttcatcgcccacacaacgcccccgggggcgcgattacgccagagcggaccaatgtgatcctgggctccaccgagacgacggggctgtccctcggcgacctggacaccatcaaggggcggctcggcctggatgcccggccgatgatggccagcatgtggatcagctgctttgtgcgcatgccccgcgtgcagctcgcgtttcggttcatgggccccgaagatgccggacggacgagacggatcctgtgccgcgccgccgagcaggctattacccgtcgccgccgaacccggcggtcccgggaggcgtacggggccgaggccgggctgggggtggccggaacgggtttccgggccaggggggacggttttggcccgctccccttgttaacccaagggccctcccgcccgtggcaccaggccctgcggggtcttaagcacctacggattggcccccccgcgctcgttttggcggcgggactcgtcctgggggccgctatttggtgggtggttggtgctggcgcgcgcctataaaaaaggacgcaccgccgccctaatcgccagtgcgttccggacgccttcgccccacacagccctcccgaccgacacccccatatcgcttcccgacctccggtcccgatggccgtcccgcaatttcaccgccccagcaccgttaccaccgatagcgtccgggcgcttggcatgcgcgggctcgtcttggccaccaataactctcagtttatcatggataacaaccacccgcacccccagggcacccaaggggccgtgcgggagtttctccgcggtcaggcggcggcgctgacggaccttggtctggcccacgcaaacaacacgtttaccccgcagcctatgttcgcgggcgacgccccggccgcctggttgcggcccgcgtttggcctgcggcgcacctattcaccgtttgtcgttcgagaaccttcgacgcccgggaccccgtgaggcccggggagttccttctggggtgttttaatcaataaaagaccacaccaacgcacgagccttgcgtttaatgtcgtgtttattcaagggagtgggatagggttcgacggttcgaaacttaacacaccaaataatcgagcgcgtctagcccagtaacatgcgcacgtgatgtaggctggtcagcacggcgtcgctgtgatgaagcagcgcccggcgggtccgctgtaactgctgttgtaggcggtaacaggcgcggatcagtaccgccagggcgctacgaccggtgcgttgcacgtagcgtcgcgacagaactgcgtttgccgatacgggcggggggccgaattgtaagcgcgtcacctcttgggagtcatcggcggataacgcactgaatggttcgttggttatgggggagtgtggttccccagggagtgggtcgagcgcctcggcctcggaatccgagaggaacaacgaggtggcgtcggagtcttcgtcgtcagagacatacagggtctgaagcagcgacacgggcgggggggtagcgtcgatgtgtagcgcgagggaggatgcccacgaagacaccccagacaaggagctgcccgtgcgtggatttgtggaagacgcggaagccgggacggatgggcggttttgcggtgcccggaaccgaaccgccggatactccccgggtgctacatgcccgttttggggctggggttggggctggggttggggctggggttggggctggggttggggctggggttggggctggggttggggttggggttggggctggggttggggttggggctggggctggggctggggctggggctggggctggggctggggctggggctggggctggggctggggctggggctggggctggggctggggctggggttggggcgcggacaggcggctgacggtcaaatgcccccgggggcgcgcagatgtggtgggcgtggccaccggctgccgtgtagtggggcggcgggaaaccgggcctccgggcgcaacaccgccctccagcgtcaagtatgtggggggcgggcctgacgtcgggggcggggcgacgggttggaccgcgggaggcgggggagagggacctgcgggagaggatgaggtcggctcggccgggttgcggcctaaaacaggggccgtggggtcggcggggtcccagggtgaagggagggattcccgcgattcggacagcgacgcgacagcggggcgcgtaaggcgccgctgcggcccgcctacgggaaccctggggggggttggcgcgggacccgaggttagcggggggcggcggttttcgcccccgggcaaaaccgtgccggttgcgaccgggggcggaacgggatcgatagggagagcgggagaagcctggccggcggcctggggcccgagcgggaggggcacaccagacaccaaagcgtggggcgctggctctgggggtttgggaggggccggggggcgcgcgaaatcggtaaccggggcgaccgtgtcggggagggcaggcggccgccaaccctgggtggtcgcggaagcctgggtggcgcgcgccagggagcgtgcccggcggtgtcggcgcgcgcgcgacccggacgaagaagcggcagaagcgcgggaggaggcgggggggcggggggcggtggcatcggggggcgccggggaactttggggggacggcaagcgccggaagtcgtcgcgggggcccacgggcgccggccgcgtgctttcggccgggacgcccggtcgtgcttcgcgagccgtgactgccggcccagggggccgcggtgcacactgggacgtggggacggactgatcggcggtgggcgaaagggggtccggggcaaggaggggcgcggggccgccggagtcgtcagacgcgagctcctccaggccgtgaatccatgcccacatgcgaggggggacgggctcgccgggggtggcgtcggtgaatagcgtgggggccaggcttccgggccccaacgagccctccgccccaacaaggtccacagggccgggggtcgggttcgggaccgaggggctctggtcgtcgggggcgcgctggtacaccggatgccccgggaatagctcccccgacaggagggaggcgtcgaacggccgcccgaggatagctcgcgcgaggaaggggtcctcgtcggtggcgctggcggcgaggacgtcctcgccgcccgccacaaacgggagctcctcggtggcctcgctgccaacaaaccgcacgtcgggggggccgggggggtccgggttttcccacaacaccgcgaccggggtcatggagatgtccacgagcaccagacacggcgggccccgggcgaggggccgctcggcgatgagcgcggacaggcgcgggagctgtgccgccagacacgcgttttcgatcgggttcaggtcggcgtgcaggaggcggacggcccacgtctcgatgtcggacgacacggcatcgcgcaaggcggcgtccggcccgcgagcgcgtgagtcaaacagcgtgagacacagctccagctccgactcgcgggaaaaggccgtggtgttgcggagcgccacgacgacgggcgcgcccaggagcactgccgccagcaccaggtccatggccgtaacgcgcgccgcgggggtgcggtgggtggcggcggccggcacggcgacgtgctggcccgtgggccggtagagggcgttggggggagcggggggtgacgcctcgcgcccccccgaggggctcagcgtctgcccagattccagacgcgcggtcagaagggcgtcgaaactgtcatactctgtgtagtcgtccggaaacatgcaggtccaaagagcgaccagagcggtgcttgggagacacatgcgcccgaggacgctcaccgccgccagcgcctgggcgggactcagctttcccagcgcggcgccgcgctcggttcccagctcggggaccgagcgccagggcgccagggggtcggtttcggacaacttgccgcggcgccagtctgccagccgcgtgccgaacatgaggccccgggtcggagggcctccggccgaaaacgctggcagcacgcggatgcgggcgtctggatgcggggtcaggcgctgcacgaatagcatggaatctgctgcgttctgaaacgcacgggggagggtgagatgcatgtactcgtgttggcgaaccagatccaggcgccaaaaggtgtaaatgtgttccggggagctggccaccagcgccaccagcacgtcgttctcgttaaaggaaacgcggtgcctagtggagctctggggtccgagcggcggccccggggccgccgcgtcacccccccattccagctgggcccagcgacacccaaactcgcgcgtgagagtggtcgcgacgagggcgacgtagagctcggccgccgcatccatcgaggccccccatctcgcctggcggtggcgcacaaagcgtccgaagagctgaaagttggcggcctgggcgtcgctgagggccagctgaagccggttgatgacggtgaggacgtacatggccgtgacggtcgaggccgactccagggtgtccgtcggaagcggggggcgaatgcatgccgcctcgggacacatcagcagcgcgccgagcttgtcggtcacggccgggaagcagagcgcgtactgcagtggcgttccatccgggaccaaaaagctgggggcgaacggccgatccagcgtactggtggcctcgcgcagcaccaggggccccgggcctccgctcactcgcaggtacgcctcgccccggcggcgcagcatctgcgggtcggcctcttggccgggtggggcggacgcccgggcgcgggcgtctagggcgcgaagatccacgagcaggggcgcgggcgcggccgccgcgcccgcgcccgtctggcctgtggccttggcgtacgcgctatataagcccatgcggcgttggatgagctcccgcgcgccccggaactcctccaccgcccatggggccaggtccccggccaccgcgtcgaattccgccaacaggccccccagggtgtcaaagttcatctcccaggccacccttggcaccacctcgtcccgcagccgggcgctcaggtcggcgtgttgggccacgcgccccccgagctcctccacggccccggcccgctcggcgctcttggcgcccaggacgccctggtacttggcgggaaggcgctcgtagtcccgctgggctcgcagccccgacacagtgttggtggtgtcctgcagggcgcgaagctgctcgcatgccgcgcgaaatccctcgggcgatttccaggcccccccgcgaacgcggccgaagcgaccccatacctcgtcccactccgcctcggcctcctcgagagacctccgcagggcctcgacgcggcgacgggtgtcgaagagcgcctgcaggcgcgcgccctgtcgcgtcaggaggcccgggccgtcgccgctggccgcgcttagcgggtgcgtctcaaaggtacgctgggcatgttccaaccaggcgaccgcctgcacgtcgagctcgcgcgccttctccgtctggtccaccagaatttcgacctgatccgcgatctcctccgccgagcgcgcctggtccagcgtcttggccacggtcgccgggacggcgaccaccttcagcagggtcttcagattggccagaccctcggcctcgagctgggcccggcgctcgcgcgcggccagcacctcccgcagccccgccgtgacccgctcggtggcttcggcgcgctgctgtttggcgcgcaccacggcgtccttggtatcggccaggtcctgtcgggtcacgaatgcgacgtagtcggcgtacgccgtgtccttcacggggctctggtccacgcgctccagcgccgccacgcacgccaccagcgcgtcctcgctcgggcagggcagggtgacccctgcccggacaagctcggcggccgccgccgggtcgttgcgcaccgcggatatctcctccgcggcggcggccaggtccagcgccacgcttccgatcgcgcgccgcgcgtcggcccggagggcgtccaggcgatcgcggatatccacgtactcggcgtagcccttttgaaaaaacggcacgtactggcgcagggccggcacgccccccaagtcttccgacaggtgtaggacggcctcgtggtagtcgataaacccgtcgttcgcctgggcccgctccagcagcccccccgccagccgcagaagccgcgccaggggctcggtgtccacccgaaacatgtcggcgtacgtgtcggccgcggccccgaaggccgcgctccagtcgatgcggtgaatggctgcgagcggggggagcatggggtggcgctggttctcgggggtgtatgggttaaacgcaagggccgtctccagggcaagggtcaccgccttggcgttggttcccagcgcctgttcggcccgctttcggaagtcccgggggttgtagccgtgcgtgcccgccagcgcctgcaggcgacggagctcgaccacgtcaaactcggcaccgctttccacgcggtccagcacggcctccacgtcggcggcccagcgctcgtggctactgcgggcgcgctgggccgccatcttctctctgaggtcggcggtggcggcctcaagttcgtcggcgcggcgtcgcgtggcgccgatgacctttcccagctcctgcagggcgcgcccgctgggggagtggtccccggccgtcccttcggcgtgcaacaggcccccgaacctgccctcgtggcccgcgaggctttcccgcgcgccggtggtcgcgcgcgtcgcggcctggatcagggaggcatgctctccctccggttggttggcggcccggcgcacctggacgacaaggtcggcggcagccgaccctaaggtcgtgagctgggcgatggccacccgcgcgtccagggccaaccgagtcgccttgacgtatcccgcggcgctgtcggccatggccgctaggaaggccaggggggaggccgggtcgctggcggccgcgcccagggccgtcaccgcgtcgaccaggacgcggtgcgcccgcacggccgcatccaccgtcgacgcagggtctgccgttgcgacggcggcgctgccggcgttgatggcgttcgagacggcgtgggctatgatcggggcgtgatcggcgaagaactgcaagagaaacggagtctctggggcgtcggcgaacaggttcttcagcaccaccacgaagctgggatgcaagccagacagagccgtcgccgtgtccggagtcgggtgctccagggcatctcggtactgccccagcagcccccacatgtccgcccgcagcgccgccgtaacctcagggggcgccccccgaacggcctcggggaggtccgaccagcccgccggcagggaggcccgcagggtcgccaggacggccggacaggcctttagccccacaaagtcagggagggggcgcaggaccccctggagtttgtgcaagaacttctcccgggcgtcgcgggccaccttcgcccgctcccgcgctccctcgagcattgcctccagggagcgcgcgcgctcccgcaaacgggcacgcgcatcgggggcgagctctgccgtcagcttggcggcatccatggcccgcgcctgccgcagcgcttcctcggccatgcgcgtggcctctggcgacagcccgccgtcgtcggggtagggcgacgcgccgggcgcaggaacaaaggccgcgtcgctgtccagctgctggcccagggccgcatctagggcgtcgaagcgccgcagctcggccagacccgagctgcggcgcgcctgttggtcgttaatgtcgcggatgctgcgcgccagctcgtccagtggcttgcgttctatcagcccttggttggcggcgtccgtcaggacggagagccaggccgccaggtcctcgggggcgtccagcgtctggccccgctggatcagatcccgcaacaggatggccgtggggctggtcgcgatcgggggcggggcgggaatggcggcgcgctgcgcgatgtcccgcgtgtgctggtcgaagacaggcagggactcgagcagctggaccacgggcacgacggcggccgaagccacgtgaaaccggcggtcgttgttgtcgctggcctgtagagccttggcgctgtatacggccccccggtaaaagtactccttaaccgcgccctcgatcgcccgacgggcctgggtccgcacctcctccagccgaacctgaacggcctcggggcccagggggggtgggcgcggagccccctgcggggccgccccggccggggcgggcattacgccgaggggcccggcgtgctgtgagaccgcgtcgaccccgcgagcgagggcgtcgagggcctcgcgcatctggcgatcctccgcctccaccctaatctcttcgccacgggcaaatttggccagagcctggactctatacagaagcggttctgggtgcgtcggggtggcgggggcaaaaagggtgtccgggtgggcctgcgagcgctccagaagccactcgccgaggcgtgtatacagattggccggcggggccgcgcgaagctgcagctccaggtccgcgagttccccgtaaaaggcgtccgtctcccgaatgacatccctagccacaaggatcagcttcgccagcgccaggcgaccgatcagagagttttcgtccagcacgtgctggacgaggggcagatgggcggccacgtcggccaggctcaggcgcgtggaggccagaaagtcccccacggccgttttccagggcagcatgttcagggtaaactccagcagggcggcggccgggccggccaccccggcctgggtgtgcgtccgggccccgttctcgatgagaaaggcgaggacgcgttcaaagaaaaaaataacacagagctccagcagccccggagaggccggatacggcgaccgtaaggcgctgatggtgagccgcgaacacgcggcgacctcgcgggccagggcggcggagcacgcggtgaacttaaccgccgtggcggccacgtttgggtgggcctcgaacagctgggcgaggtctgcgcccgggggctcgggcgagcggcgagtcttcagcgcctcgagggcctgtgaggacgccggaaccgtgggcccgtcgtcctcgcccgcctcggcgaccggcggcccggccgggtcggggggtgccgaggcgaggacaggctccggaacggaggcggggaccgcggccccgacgggggttttgcctttgggggtggatttcttcttggttttggcagggggggccgagcgtttcgttttctcccccgaagtcaggtcttcgacgctggaaggcggagtccaggtgggtcggcggcgcttgggaaggccggccgagtagcgtgcccggtgccgaccaaccgggacgacgcccatctccaggacccgcatgtcgtcgtcatcttcttcggccgcctctgcggcgggggtcttgggggcggagggaggcggtggtgggatcgcggagggtgggtcggcggagggtgggtcggcggaggggggatccgtgggtggggtacccttcagggccaccgcccatacatcgtcgggcgcccgattcgggcgcttggcctctggttttgccgacggaccggccgtcccccgggatgtctcggaggccctgtcgtcgcgacgggcccgggtcggtggcggcgactgggcggctgtgggcgggtgtggccccgggccccctaccccctcccgggggcccacgccgacgcagggctcccccaggcccgcgatctcgccccgcagggggtgcgtgatggccacgcgccgttcgctgaacgcttcgtcctgcaggtaagtctcgctggccccgtaaagatgcagagccgcggccgtcaagtccgcaggagccgcgggttccgggcccgacggcacgaaaaacaccatggctcccgcccaccgtacgtccgggcgatcgcgggtgtaatacgtcaggtatggatacatgtcccccgcccgcactttggcgatgaacgcgggggtgccctccggaaggccgtgcgggtcaaaaaggtatgcggtgtcgccgtccctgaacagccccatccctagggggccaatggttaggagcgtgtacgacagggggcgcagggcccacgggccggcgaagaacgtgtgtgcggggcattgtgtctccagcaggcccgccgcgggctccccgaagaagcccacctcgccgtatacgcgcgagaagacacagcgcagtccgccgcgcgcccctgggtactcgaggaagttggggagctcgacgatcgaacacatgcgcggcggcccagggcccgcggtcgcgcgcgtccactcgcccccctcgaccaaacatccctcgatggcctccgcggacaggacgtcgcgagggcccacatcaaatatgaggctgagaaaggacagcgacgagcgcatgcacgataccgacccccccggctccaggtcgggcgcgaactggttccgagcaccggtgaccacgatgtcgcgatcccccccgcgttccatcgtggagtgcggtggggtgcccgcgatcatatgtgccctgctggccagagacccggcctgtttatggaccggacccccggggttagtgttgtttccgccacccatgcccccgtaccatggccccggttcccctgattaggctacgagtcgcggtgatcgcttcccaaaaaccgagctgcgtttgtctgtcttggtcttccacccccccccccgcccgcccgcacaccataacaccgagaacaacacacgggggtgggcgtaacataataaagctttattggtaactagttaacggcaagtccgtgggtggcgcgacggtgtcctccgggatcatctcgtcgtcctcgacgggggtgttggaatgaggcgccccctcgcggtccgcctggcgtgggccgtgcccataggcctccggcttctgtgcgtccatgggcataggcgcggggagactgtttccggcgtcgcggacctccaggtccctgggagactccggtccggctaacggacgaaacgcggaagcgcgaaacacgccgtcggtgacccgcaggagctcgttcatcagtaaccaatccatactcagcgtaacggccagcccctggcgagacagatccacggagtccggaaccgcggtcgtctggcccagggggccgaggctgtagtccccccaggcccctaggtcgcgacggctcgtaagcacgacgcggtcggccgcggggctttgcgggggggcgtcctcgggcgcatgcgccattacctctcggatggccgcggcgcgctggtcggccgagctgaccaagggcgccacgaccacggcgcgctccgtctgcaggcccttccacgtgtcgtggagttcctggacaaactcggccacgggctcgggtcccgcggccgcgcgcgcggcttgatagcaggccgacagacgccgccagcgcgctagaaactgacccatgaagcaaaacccggggacctggtctcccgacagcagcttcgacgcccgggcgtgaatgccggacacgacggacagaaacccgtgaatttcgcgccggaccacggccagcacgttgtcctcgtgcgacacctgggccgccagctcgtcgcacacccccaggtgcgccgtggtttcggtgatgacggaacgcaggctcgcgagggacgcgaccagcgcgcgcttggcgtcgtgatacatgctgcagtactgactcaccgcgtcccccatggcctcggggggccagggccccaggcggtcgggcgtgtccccgaccaccgcatacaggcggcgcccgtcgctctcgaaccgacactcgaaaaaggcggagagcgtgcgcatgtgcagccgcagcagcacgatggcgtcctccagttggcgaatcagggggtctgcgcgctcggcgaggtcctgcagcaccccccgggcggccagggcgtacatgctaatcaacaggaggctggtgcccacctcggggggcggggggggctgcagctggaccaggggccgcagctgctcgacggcacccctggagatcacgtacagctcccggagcagctgctctatgttgtcggccatctgcatagtggggccgaggccgccccgggcggccggttcgaggagggtgatcagcgcgcccagtttggtgcgatggccctcaaccgtggggagatagcccagcccaaagtcccgggcccaggccaacacacgcagggcgaactcgaccgggcggggaaggtaggccgcgctacacgtggccctcagcgcgtccccgaccaccagggccagaacgtaggggacgaagcccgggtcggcgaggacgttggggtgaatgccctcgagggcggggaagcggatctgggtcgccgcggccaggtggacagagggggcgtggctgggctgcccgacggggagaagcgcggacagcggcgtggccggggtggtgggggtgatgtcccagtgggtctgaccatacacgtcgatccagatgagcgccgtctcgcggagaaggctgggttgaccggaactaaagcggcgctcggccgtctcaaactcccccacgagcgcccgccgcaggctcgccagatgttccgtcggcacggccggacccatgatacgcgccagcgtctggcttagaacgccccccgacaggccgaccgcctcgcagagccgcccgtgcgtgtgctcgctggcgccctggacccgcctgaaagtttttacgtagttggcatagtacccgtattcccgcgccaacccaaacacgttcgaccccgcgagggcaatgcacccaaagagctgctggacttcgccgagtccgtggccggtgggcgtccgcgcggggacgcccgccgccagaaacccctccagggccgaaaggtagtgcgtgcagtgcgagggcgtgaacccagcgtcgatcagggtgttgatcaccacggagggcgaattggtattctggatcaacgtccacgtctgctgcagcagagccagcagccgctgctgggcgccggcggagggctgctccccgagctgcagcaggctggagacggcaggctggaagactgccagtgccgacgaactcaggaacggcacgtcgggatcaaacacggccacgtccgtccgcacgcgcgccattagcgtccccgggggcgcacaggccgagcgcgggctgacgcggctgagggccgtcgacacgcgcacctcctcgcggctgcgaaccatcttgttggcctcgagcggcggaatcattatggccgggtcgatctcccgcacggtgtgctgaaactgcgccaacaggggcggcgggaccacagccccccgctcgggggtcgtcaggtactcgtccaccagggccaacgtaaagagggcccgtgtgaggggagtgagggtcgcgtcgtctatgcgctggaggtgcgccgagaacagcgtcacccgattactcaccagggccaagaaccggaggccctcttgcacgaacggggcggggaagagcaggctgtacgccggggtggtaaggttcgcgctgggctgccccaacgggaccggcgccatcttgagcgacgtctccccaagggcctcgatggaggtccgcgggctcatggccaagcagctcttggtgacggtttgccagcggtctatccactccacggcgcactggcggacgcggaccggccccagggccgccgcggtgcgcaggccggcggaatccagcgcatgggacgtgtcggagccggtgaccgcgaggatggtgtccttgatgacctccatctcccggaaggcctggtcgggggcctcggggagagccaccaccaagcggtgtacgagcaacccggggaggttctcggccaagagcgccgtctccggaagcccgtgggcccggtggagcgcgcacaggtgttccagcagcggccgccagcatgcccgcgcgtctgccggggcgatggccgttcccgacaacagaaacgccgccatggcggcgcgcagcttggccgtggccagaaacgccgggtcgtccgccccgtttgccgtctcggccgtgggggttggcggttggcgaaggccggctaggctcgccaataggcgctgcataggtccgtccgagggcggaccggcgggtgaggtcgtgacgacgggggcctcggacgggagaccgcggtctgccatgacgcccggctcgcgtgggtgggggacagcgtagaccaacgacgagaccgggcgggaatgactgtcgtgcgctgtagggagcggcgaattatcgatcccccgcggccctccaggacccccgcaggcgttgcgagtaccccgcgtcttcgcggggtgttatacggccacttaagtcccggcatcccgttcgcggacccaggcccgggggattgtccggatgtgcgggcagcccggacggcgtgggttgcggactttctgcggggcggcccaaatggccctttaaacgtgtgtatacggacgcgccgggccagtcggccaacacaacccaccggaggcggtagccgcgtttggctgtggggtgggtggttccgccttgcgtgagtgtcctttcgacccccccccccctccctcccccgggtcttgctaggtcgcgatctggggtcgcaatgaagaccaatccgctacccgcaaccccttccgtgtggggcgggagtaccgtggaactcccccccacaacacgcgataccgcgggacagggcctgcttcggcgcgtcctgcgccccccgatctctcgccgcgacggcccagggctccccagggggtcgggaccccggagggcggccagcacgctgtggttgcttggcctggacggcacagacgcgccccctggggcgctgacccccaacgacgataccgaacaggccctggacaagatcctgcggggcaccatgcgcgggggggcggccctgatcggctccccgcgccatcatctaacccgccaagtgatcctgacggatctgtgccaacccaacgcggatcgtgctgggacgctgcttctggcgctgcggcaccccgccgacctgcctcacctggcccaccagcgcgccccgccaggccggcagaccgagcggctgggcgaggcctggggccagctgatggaggcgaccgccctggggtcggggcgagccgagagcgggtgcacgcgcgcgggcctagtgtcgtttaacttcctggtggcggcgtgtgccgcctcgtacgacgcgcgcgacgccgccgatgcggtacgggcccacgtcacggccaactaccgcgggacgcgggtgggggcgcgcctggatcgtttttccgagtgtctgcgcgccatggttcacacgcacgtcttcccccacgaggtcatgcggtttttcggggggctggtgtcgtgggtcacccaggacgagctagcgagcgtcaccgccgtgtgcgccgggccccaggaggcggcgcacaccggccacccgggccggccccgctcggccgtgatcctcccggcatgtgcgttcgtggacctggacgccgagctggggctggggggcccgggcgcggcgtttctgtacctggtattcacttaccgccagcgccgggaccaggagctgtgttgtgtgtacgtgatcaagagccagctccccccgcgcgggttggagccggccctggagcggctgtttgggcgcctccggatcaccaacacgattcacggcaccgaggacatgacgcccccggccccaaaccgaaaccccgacttccccctcgcgggcctggccgccaatccccaaaccccgcgttgctcggctggccaggtcacgaacccccagttcgccgacaggctgtaccgctggcagccggacctgcgggggcgccccaccgcacgcacctgtacgtacgccgcctttgcagagctcggcatgatgcccgaggatagtccccgctgcctgcaccgcaccgagcgctttggggcggtcagcgtccccgttgtcattctggaaggcgtggtgtggcgccccggcgagtggcgggcatgcgcgtgagcgtagcaaacgccccgcccacacaacgctccgcccccaaccccttccccgctgtcactcgttgttcgttgacccgggcgtccgccaaataaagccactgaaacccgaaacgcgagtgttgtaacgtcctttgggcgggaggaagccacaaaatgcaaatgggatacatggaaggaacacacccccgtgactcaggacatcggtgtgtccttttgggtttcactgaaactggcccgcgccccacccctgcgcgatgtggataaaaagccagcgcgggtggtttagggtaccacaggtgggtgctttggaaacttgccggtcgccgtgctcctgtgagcttgcgtccctccccggtttcctttgcgctcccgccttccggacctgctctcgcctatcttctttggctctcggtgcgattcgtcaggcagcggccttgtcgaatctcgaccccaccactcgccggacccgccgacgtcccctctcgagcccgccgaaacccgccgcgtctgttgaaatggccagccgcccagccgcatcctctcccgtcgaagcgcgggccccggttgggggacaggaggccggcggccccagcgcagccacccagggggaggccgccggggcccctctcgcccacggccaccacgtgtactgccagcgagtcaatggcgtgatggtgctttccgacaagacgcccgggtccgcgtcctaccgcatcagcgatagcaactttgtccaatgtggttccaactgcaccatgatcatcgacggagacgtggtgcgcgggcgcccccaggacccgggggccgcggcatcccccgctcccttcgttgcggtgacaaacatcggagccggcagcgacggcgggaccgccgtcgtggcattcgggggaaccccacgtcgctcggcggggacgtctaccggtacccagacggccgacgtccccaccgaggcccttgggggcccccctcctcctccccgcttcaccctgggtggcggctgttgttcctgtcgcgacacacggcgccgctctgcggtattcgggggggagggggatccagtcggccccgcggagttcgtctcggacgaccggtcgtccgattccgactcggatgactcggaggacacggactcggagacgctgtcacacgcctcctcggacgtgtccggcggggccacgtacgacgacgcccttgactccgattcgtcatcggatgactccctgcagatagatggccccgtgtgtcgcccgtggagcaatgacaccgcgcccctggatgtttgccccgggacccccggcccgggcgccgacgccggtggtccctcagcggtagacccacacgcgccgacgccagaggccggcgctggtcttgcggccgatcccgccgtggcccgggacgacgcggaggggctttcggacccccggccacgtctgggaacgggcacggcctaccccgtccccctggaactcacgcccgagaacgcggaggccgtggcgcgctttctgggagatgccgtgaaccgcgaacccgcgctcatgctggagtacttttgccggtgcgcccgcgaggaaaccaagcgtgtcccccccaggacattcggcagcccccctcgcctcacggaggacgactttgggcttctcaactacgcgctcgtggagatgcagcgcctgtgtctggacgttcctccggtcccgccgaacgcatacatgccctattatctcagggagtatgtgacgcggctggtcaacgggttcaagccgctggtgagccggtccgctcgcctttaccgcatcctgggggttctggtgcacctgcggatccggacccgggaggcctcctttgaggagtggctgcgatccaaggaagtggccctggattttggcctgacggaaaggcttcgcgagcacgaagcccagctggtgatcctggcccaggctctggaccattacgactgtctgatccacagcacaccgcacacgctggtcgagcgggggctgcaatcggccctgaagtatgaggagttttacctaaagcgttttggcgggcactacatggagtccgtcttccagatgtacacccgcatcgccggctttttggcctgccgggccacgcgcggcatgcgccacatcgccctggggcgagaggggtcgtggtgggaaatgttcaagttctttttccaccgcctctacgaccaccagatcgtaccgtcgacccccgccatgctgaacctggggacccgcaactactacacctccagctgctacctggtaaacccccaggccaccacaaacaaggcgaccctgcgggccatcaccagcaacgtcagtgccatcctcgcccgcaacgggggcatcgggctatgcgtgcaggcgtttaacgactccggccccgggaccgccagcgtcatgcccgccctcaaggtccttgactcgctggtggcggcgcacaacaaagagagcgcgcgtccgaccggcgcgtgcgtgtacctggagccgtggcacaccgacgtgcgggccgtgctccggatgaagggggtcctcgccggcgaagaggcccagcgctgcgacaatatcttcagcgccctctggatgccagacctgtttttcaagcgcctgattcgccacctggacggcgagaagaacgtcacatggaccctgttcgaccgggacaccagcatgtcgctcgccgactttcacggggaggagttcgagaagctctaccagcacctcgaggtcatggggttcggcgagcagatacccatccaggagctggcctatggcattgtgcgcagtgcggccacgaccgggagccccttcgtcatgttcaaagacgcggtgaaccgccactacatctacgacacccagggggcggccatcgccggctccaacctctgcaccgagatcgtccatccggcctccaagcgatccagtggggtctgcaacctgggaagcgtgaatctggcccgatgcgtctccaggcagacgtttgactttgggcggctccgcgacgccgtgcaggcgtgcgtgctgatggtgaacatcatgatcgacagcacgctacaacccacgccccagtgcacccgcggcaacgacaacctgcggtccatgggaatcggcatgcagggcctgcacacggcctgcctgaagctggggctggatctggagtctgccgaatttcaggacctgaacaaacacatcgccgaggtgatgctgctgtcggcgatgaagaccagcaacgcgctgtgcgttcgcggggcccgtcccttcaaccactttaagcgcagcatgtatcgcgccggccgctttcactgggagcgctttccggacgcccggccgcggtacgagggcgagtgggagatgctacgccagagcatgatgaaacacggcctgcgcaacagccagtttgtcgcgctgatgcccaccgccgcctcggcgcagatctcggacgtcagcgagggctttgcccccctgttcaccaacctgttcagcaaggtgacccgggacggcgagacgctgcgccccaacacgctcctgctaaaggaactggaacgcacgtttagcgggaagcgcctcctggaggtgatggacagtctcgacgccaagcagtggtccgtggcgcaggcgctcccgtgcctggagcccacccaccccctccggcgattcaagaccgcgtttgactacgaccagaagttgctgatcgacctgtgtgcggaccgcgccccctacgtcgaccatagccaatccatgaccctgtatgtcacggagaaggcggacgggaccctcccagcctccaccctggtccgccttctggtccacgcatataagcgcggactaaaaacagggatgtactactgcaaggttcgcaaggcgaccaacagcggggtctttggcggcgacgacaacattgtctgcatgagctgcgcgctgtgaccgacaaaccccctccgcgccaggcccgccgccactgtcgtcgccgtcccacgctctcccctgctgccatggattccgcggccccagccctctcccccgctctgacggcccttacgggccagagcgcgacggcggacctggcgatccagattccaaagtgccccgaccccgagaggtacttctacacctcccagtgtcccgacattaaccacctgcgctccctcagcatccttaaccgctggctggaaaccgagcttgttttcgtgggggacgaggaggacgtctccaagctttccgagggcgagctcagcttttaccgcttcctcttcgctttcctgtcggccgccgacgacctggttacggaaaacctgggcggcctctccggcctgtttgagcagaaggacattctccactactacgtggagcaggaatgcatcgaagtcgtacactcgcgcgtgtacaacatcatccagctggtgcttttccacaacaacgaccaggcgcgccgcgagtacgtggccggtaccatcaaccacccggccatccgcgccaaggtggactggttggaagcgcgggtgcgggaatgcgcctccgttccggaaaagttcattctcatgatcctcatcgagggcatcttttttgccgcctcgtttgccgccatcgcctaccttcgcaccaacaaccttctgcgggtcacctgccagtcaaacgacctcatcagccgggacgaggccgtgcacacgacggcctcgtgttacatctacaacaactacctcggcgggcacgccaagcccccgcccgaccgcgtgtacgggctgttccgccaggcggtcgagatcgagatcggatttatccgatcccaggcgccgacggacagccatatcctgagcccggcggcgctggcggccatcgaaaactacgtgcgattcagcgcggatcgcctgttgggccttatccacatgaagccactgttttccgccccaccccccgacgccagctttccgctgagcctcatgtccaccgacaaacacaccaattttttcgagtgtcgcagcacctcctacgccggggcggtcgtcaacgatctgtgagtgtcgcggcgcgcttctacccgtgtttgcccataataaacctctgaaccaaactttgggtctcattgtgattcttgtcagggacgcgggggtgggagaggataaaaggcggcgcaaaaagcagtaaccaggtccgtccagattctgcgggcataggataccataattttattggtgggtcgtttgttcggggacaagcgcgctcgtctgacgtttgggctactcgtcccagaatttggccaggacgtccttgtagaacgcgggtgggggggcctgggtccgcaactgctccagaaacctgtcggcgatatcaggggccgtgatatgccgggtcacgatagatcgcgccaggttttcgtcgcggatgtcctggtagataggcaggcgtttcagaagagtccacggcccccgctccttggggccgataagcgatatgacgtacttaatgtagcggtgttccaccagctcggtgatggtcatgggatcggggagccagtccagggactctggggcgtcgtggatgacgtggcgtcgccggttggccacataactgcggtgctcttccagcagctgcgcgttcgggacctggacgagctcgggcggggtgagtatctccgaggaggacgacctggggccggggtggcccccggtaacgtcccggggatccagggggaggtcctcgtcgtcttcgtatccgccggcgatctgttgggttagaatttcggtccacgagacgcgcgtctcggtgccgccggcggccggcggcagagggggcctggtttccgtggagcgcgagctggtgtgttcccggcggatggcccgccgggtctgagagcgactcgggggggtccagtgacattcgcgcagcacatcctccacggaggcgtaggtgttattgggatggaggtcggtgtggcagcggacaaagagggccaggaactgggggtagctcatcttaaagtactttagtatatcgcgacagttgatcgtgggaatgtagcaggcgctaatatccaacacaatatcacagcccatcaacaggaggtcagtgtccgtggtgtacacgtacgcgaccgtgttggtgtgatagaggttggcgcaggcatcgtccgcctccagctgacccgagttaatgtaggcgtaccccagggcccggagaacgcgaatacagaacagatgcgccagacgcagggccggcttcgagggcgcggcggacggcagcgcggctccggacccggccgtcccccgggtccccgaggccagagaggtgccgcgccggcgcatgttggaaaaggcagagctgggtctggagtcggtgatgggggaaggcggtggagaggcgtccacgtcactggcctcctcgtccgtccggcactgggccgtcgtgcgggccaggatggccttggctccaaacacaaccggctccatacaattgaccccgcgatcggtaacgaagatggggaaaagggacttttgggtaaacacctttaataagcgacagaggcagtgtagcgtaatggcctcgcggtcgtaactggggtatcggcgctgatatttgaccaccaacgtgtacatgacgttccacaggtccacggcaatgggggtgaagtacccggccggggccccaaggccccggcgcttgaccagatggtgtgtgtgggcaaacttcatcatcccgaacaaacccatgtcaggtcaattgtaactgcggatcggcctaactaaggcgtggttggtgcgacggtccgggacacccgagcctgtctctctgtgtatggtgacccagacaacaacaccgacacaagaggacaataatccgttaggggacgctctttataatttcgatggcccaactccacgcggattggtgcagcaccctgcatgcgccggtgcgggccaaccttccccccgctcattgcctcttccaaaagggtgtggcctaacgagctgggggcgtatttaatcaggctagcgcggcgggcctgccgtagtttctggctcggtgagcgacggtccggttgcttgggtcccctggctgccatcaaaaccccaccctcgcagcggcatacgccccctccgcgtcccgcacccgagaccccggcccggctgccctcaccaccgaagcccacctcgtcactgtggggtgttcccagcccgcgttgggatgacggattcccctggcggtgtggcccccgcctcccccgtggaggacgcgtcggacgcgtccctcgggcagccggaggagggggcgccctgccaggtggtcctgcagggcgccgaacttaatggaatcctacaggcgtttgccccgctgcgcacgagccttctggactcgcttctggttatgggcgaccggggcatccttatccataacacgatctttggggagcaggtgttcctgcccctggaacactcgcaattcagtcggtatcgctggcgcggacccacggcggcgttcctgtctctcgtggaccagaagcgctccctcctgagcgtgtttcgcgccaaccagtacccggacctacgtcgggtggagttggcgatcacgggccaggccccgtttcgcacgctggttcagcgcatatggacgacgacgtccgacggcgaggccgttgagctagccagcgagacgctgatgaagcgcgaactgacgagctttgtggtgctggttccccagggaacccccgacgttcagttgcgcctgacgaggccgcagctcaccaaggtccttaacgcgaccggggccgatagtgccacgcccaccacgttcgagctcggggttaacggcaaattttccgtgttcaccacgagtacctgcgtcacctttgctgcccgcgaggagggcgtgtcgtccagcaccagcacccaggtccagatcctgtccaacgcgctcaccaaggcgggccaggcggccgccaacgccaagacggtgtacggggaaaatacccatcgcaccttctctgtggtcgtcgacgattgcagcatgcgggcggtgctccggcgactgcaggtcggcgggggcaccctcaagttcttcctcacgacccccgtccccagtctgtgcgtcaccgccaccggtcccaacgcggtatcggcggtatttctcctgaaaccccagaagatttgcctggactggctgggtcatagccaggggtctccttcagccgggagctcggcctcccgggcctctgggagcgagccaacagacagccaggactccgcgtcggacgcggtcagccacggcgatccggaagacctcgatggcgctgcccgggcgggagaggcgggggccttgcatgcctgtccgatgccgtcgtcgaccacgcgggtcactcccacgaccaagcgggggcgctcggggggcgaggatgcgcgcgcggacacggccctaaagaaacctaagacggggtcgcccaccgcacccccgcccgcagatccagtccccctggacacggaggacgactccgatgcggcggacgggacggcggcccgtcccgccgctccagacgcccggagcggaagccgttacgcgtgttactttcgcgacctcccgaccggagaagcaagccccggcgccttctccgccttccgggggggcccccaaaccccgtatggttttggattcccctgacggggcggggccttggcggccgcccaactctcgcaccatcccgggttaatgtaaataaacttggtattgcccaacactttcccgcgtgtcgcgtgtggttcatgtgtgtgcctggcgcccccaccctcgggttcgtgtatttcctttccctgtccttataaaagccgtatgtggggcgctgacggaaccaccccgcgtgccatcacggccaaggcgcgggatgctccgcaacgacagccaccgggccgtgtccccggaggacggccagggacgggtcgacgacggacggccacacctcgcgtgcgtgggggccctggcgcgggggttcatgcatatctggcttcaggccgccacgctgggttttgcgggatcggtcgttatgtcgcgcgggccgtacgcgaatgccgcgtctggggcgttcgccgtcgggtgcgccgtgctgggctttatgcgcgcaccccctcccctcgcgcggcccaccgcgcggatatacgcctggctcaaactggcggccggtggagcggcccttgttctgtggagtctcggggagcccggcacgcagccgggggccccggccccgggcccggccacccagtgcctggcgctgggcgccgcctatgcggcgctcctggtgctcgccgatgacgtctatccgctctttctcctcgccccggggcccctgttcgtcggcaccctggggatggtcgtcggcgggctgacgatcggaggcagcgcgcgctactggtggatcggtgggcccgccgcggccgccctggccgcggcggtgttggcgggcccgggggcgaccaccgccagggactgcttttccagggcttgccccgaccaccgccgcgtctgtgtcatcaccgcaggcgagtctctttcccgccgccccccggaggacccagagcgacccggggttcccgggcccccgtcccccccgaccccccaacgatcccacgggccgccggccgatgaggtcgcaccggccagggtcgcgcggcccgaaaacgtctgggtgcccgtggtcacctttctgggggcgggcgcgcttgccgtcaagacggtgcgagaacatgcccggggaacgccgggcccgggcctgccgctgtggccccaggtgtttctcggaggccatgtggcggtggccctgacggagctgtgtcaggcgcttgcgccctgggaccttacggacccgctgctgtttgttcacgccggactgcaggtcatcaacctcgggttggtgtttcggttttccgaggttgtcgtgtatgcggcgctagggggtgccgtgtggatttcgttggcgcaggtgctggggctccggcgtcgcctgcacaggaaggaccccggggacggggcccggttggcggcgacgcttcggggcctcttcttctccgtgtacgcgctggggtttggggtgggggtgctgctgtgccctccggggtcaacgggcgggcggtcgggcgattgatatatttttcaataaaaggcattagtcccgaagaccgccggtgtgtgatgatttcgccataacacccaaaccccggatggggcccgggtataaattccggaaggggacacgggctaccctcactatcgagggcgcttggtcgggaggccgcatcgaacgcacacccccatccggtggtccgtgtggaggtcgttttcagtgcccggtctcgctttgccgggaacgctagccgatccctcgcgagggggaggcgtcgggcatggccccggggcgggtgggccttgccgtggtcctgtggagcctgttgtggctcggggcgggggtgtccgggggctcggaaactgcctccaccgggcccacgatcaccgcgggagcggtgacgaacgcgagcgaggcccccacatcggggtcccccgggtcagccgccagcccggaggtcacccccacatcgaccccaaaccccaacaatgtcacacaaaacaaaaccacccccaccgagccggccagccccccaacaacccccaagcccacctccacgcccaaaagcccccccacgtccacccccgaccccaaacccaagaacaacaccacccccgccaagtcgggccgccccactaaaccccccgggcccgtgtggtgcgaccgccgcgacccattggcccggtacggctcgcgggtgcagatccgatgccggtttcggaattccacccgcatggagttccgcctccagatatggcgttactccatgggtccgtcccccccaatcgctccggctcccgacctagaggaggtcctgacgaacatcaccgccccacccgggggactcctggtgtacgacagcgcccccaacctaacggacccccacgtgctctgggcggagggggccggcccgggcgccgaccctccgttgtattctgtcaccgggccgctgccgacccagcggctgattatcggcgaggtgacgcccgcgacccagggaatgtattacttggcctggggccggatggacagcccgcacgagtacgggacgtgggtgcgcgtccgcatgttccgccccccgtctctgaccctccagccccacgcggtgatggagggtcagccgttcaaggcgacgtgcacggccgccgcctactacccgcgtaaccccgtggagtttgtctggttcgaggacgaccaccaggtgtttaacccgggccagatcgacacgcagacgcacgagcaccccgacgggttcaccacagtctctaccgtgacctccgaggctgtcggcggccaggtccccccgcggaccttcacctgccagatgacgtggcatcgcgactccgtgacgttctcgcgacgcaatgccaccgggctggccctggtgctgccgcggccaaccatcaccatggaatttggggtccggcatgtggtctgcacggccggctgcgtccccgagggcgtgacgtttgcctggttcctgggggacgacccctcaccggcggctaagtcggccgttacggcccaggagtcgtgcgaccaccccgggctggctacggtccggtccaccctgcccatttcgtacgactacagcgagtacatctgtcggttgaccggatatccggccgggattcccgttctagaacaccacggcagtcaccagcccccacccagggaccccaccgagcggcaggtgatcgaggcgatcgagtgggtggggattggaatcggggttctcgcggcgggggtcctggtcgtaacggcaatcgtgtacgtcgtccgcacatcacagtcgcggcagcgtcatcggcggtaacgcaagacccccccgttacctttttaatatctatatagtttggtcccccctctatcccgcccaccgctgggcgctataaagccgccaccctctcttccctcaggtcatccttggtcgatcccgaacgacacacggcgtggagcaaaacgcctccccctgagccgctttcctaccaacacaacggcatgcctctgcgggcatcggaacacgcctaccggcccctgggccccgggacaccccccatgcgggctcggctccccgccgcggcctgggttggcgtcgggaccatcatcgggggagttgtgatcattgccgcgttggtcctcgtgccctcgcgggcctcgtgggcactttccccatgcgacagcggatggcacgagttcaacctcgggtgcatatcctgggatccgacccccatggagcacgagcaggcggtcggcggctgtagcgccccggcgaccctgatcccccgcgcggctgccaaacagctggccgccgtcgcacgcgtccagtcggcaagatcctcgggctactggtgggtgagcggagacggcattcgggcctgcctgcggctcgtcgacggcgtcggcggtattgaccagttttgcgaggagcccgcccttcgcatatgctactatccccgcagtcccgggggctttgttcagtttgtaacttcgacccgcaacgcgctggggctgccgtgaggcgcgtgtactgcggtctgtctcgtctcctcttctccccttccctccccctccgcatcccaggatcacaccggtcaacgagggttgggggggtccggcacggacccaaaataataaacacacaatcacgtgcgataaaaagaacacgcggtcccctgtggtgtttttggttatttttattaaatctcgtcgacaaacagggggaaaggggcgtggtctagcgacggcagcacgggcggaggcgttcaccggctccggcgtccttcgcgtttaagcttggtcaggagggcgctcagggcggcgacgttggtcgggccgtcgttggtcagggcgttggctcgatggcgggcgaggacgggcgaggggctcaacggcgggggcgggggcccggtgcggcccgggggggaaaatagggcggatcccccccagtcgtacaggggattttccgcctcaatgtacggggaggccggcgctgcattcgccgtgttcacgcagacgttttcgtagacccgcatccatggtatttcctcgtagacacgccccccgtcctcgctcaccgtctcgtatattgactcgtcgtcctcgtagggggcgtgccgttcgcgggccgaggcggcgtgggtggctttgcggcgggcgtcgtcgtcgtcgtcgtcggccgtcagatacgtggcttccatctggtcgggttctccctccggggcgggtccccacacccgtggccgatcgaggctccccagagacgcgcgccggacgaggagggggcacgtcgccgccggcggtcgcctgtcgggtcccgcgacgttacgggccgggaggcgcgggggcacctcccccatgtgcgtgtaatacgtggccggctgtgtggccgcagcggggggctcggcgaccgggtcgttcgcatccggaagcgggggccccgcgccgtccgcgcggcgcctccggaacctccgggtggacgcgggggtcgagtgtaggcgaggtcgggggaggggcgggggctcgttgtcgcgccgcgcccgctgaatcttttcccgacaggtcccaccccccgcgcgatgcccccccgggccgctggccatgtcgtccgggggaggccccgcggaccacgtcgtccggcgagacgccacgagccgcaggatggactcgtagtggagcgacggcgccccgttgcggagcagatccgcggccagggcggccccgaaccaagccttgatgctcaactccatccgggcccagctgggggcggtcatcgtggggaacaggggggcggtggtccgacagaaacgctcctggctgtccaccgcggcccgcagatactcgttgttcaggctgtcggtggcccagacgccgtacccggtgagggtcgcgttgatgatatactgggcgtggtgatggacgatcgacagaacctccaccgtggatacgacggtatccacggtcccgtacgtaccgccgctccgcttgccggtctgccacaggttggctaggcgcgtcaggtggcccaggacgtcgctgaccgccgccctgagcgccatgcactgcatggagccggtcgtgccgctgggaccccggtccagatggcgcgcgaacgtttccgcgggcgcctccgggctgccgccgagcgggaggaaccggcgattggagggactcagccggtgacatacgtgcttgtccgtcgtccacagcatccaggacgcccaccggtacagcacggagacgtaggccaggagctcgttgagccgcagtgcggtgtcggtgctggggcggcttgggtccgccgggcgcataaagaacatgtactgctgaatccgatggagggcgtcgcgcaggccggccacggtggcggcgtacttggccgccacggccccgctcttgaacggggtgcgcgccagcagctttggcgccagggtgggccgcagcagcacgtgaaggctggggtcgcagtcgcccacggggtcctcggggacgtccaggccgctgggcaccaccgtctgcaggtacttccagtactgcgtgaggatggcgcggctcaactggccgccgggcagctccacctcgcccagcgcctgggtggcggccgaagcgtagtgccggatgtactcgtagtgcgggtcgctggcgagcccgtccacgatcaaactctcgggaaccgtgttgtgttgccgcgcggccaaccggacgctgcgatcggtgcaggtcagaaacgccggctgcgcgtcgtcggagcgctgccgcaaggcgcccacggccgcgctaaggagcccctccggggtggggagcagacacccgccgaagatgcgccgctcgggaacgcccgcgttgtcgccgcggatcaggttggcaggcgtcaggcaccgcgccagccgcagggagctcgcgccgcgcgtccggcgctgcatggtgacgcccgttcggtcgggacccgccggtcggagttatgccgcgtccagggccatcggggcgctttttatcgggaggagcttatgggcgtggcgggcctcccagcccggtcgcgcgcctccccgacacgtgcgcccgcagggcggcggccccctcgtctcccatcagcagtttcctaaactgggacatgatgtccaccacgcggacccgcgggcccaacacggacccgccgcttacgggggcgggggggaagggctccaggtccttgagaagaaaggcggggtctgccgtcccggacacgggggcccggggcgctgaggaggcggggcgcagatccacgtgctccgcggccgcgcggacgtccgcccagaacttggcgggggtggtgcgcgcgtacaggggctgggtcgctcggaggacgcacgcgtagcgcaggggggtgtacgtgcccacctcgggggccgtgaatcccccgtcaaacgcggccagtgtcacgcacgccaccacggtgtcggcaaagcccagcagccgctgcaggacgagcccggcggccagaatggcgcgcgtggccgccgcgtcgtcccggcgccggtgcgcgtccccgcacgcccgggcgtactttaaggtcacggtcgccagggccgtgtgcagcgcgtacaccgcagcgcccagcacggcgttgagcccgctgttggcgagcagccggcgcgctgcggtgtcgcccagcgcctcgtgctcggcccccacgaccgcggggcttcccaggggcagggcgcgaaacagctcctcccgcgccacgtccgcaaaggcggggtggtgcacgtgcgggtgcaggcgcgcccccacgaccaccgagagccactggaccgtctgctccgccatcaccgccagcacatccagcacgcgccccaggaaggcggcctcccgcgtcaaaacgcaccggacggcgtcgggattgaagcgggcgagcagggccccggtggccaggtacgtcatgcggccggcatagcgggcggccacgcgacagtcgcggtccagcagcgcgcgcaccccgggccagtacagcagggaccccagcgagctgcggaacaccgcggcgtcggggccggattggggggacactaacccccccgcgctcagtaacggcacggccgcggccccgacgggacgcaacgccgtgaggctcgcgaactgccgcctcagctcggccgccctgtcgtccaggtcagacccgcgcgcctccgcgtgaaggcgcgtcccgcacacccacccgttgatggccagccgcacgacggcatccgccaaaaagctcatcgcctgggcggggctggtttttgttcgacgatccgtcaggtcaagaatcccatcgcccgtgatataccaggccaacgcctcgccctgctgcagggtttggcggaaaaacaccgcggggttgtcgggggaggcgaagtgcatgacccccacgcgcgataacccgaacgcgctatccggacacgggtaaaacccggccggatgccccagggctagggcggagcgcacggactcgtcccacacggcaacctgaggggccagtcgatccaacgggaatgccgcccggagctccgggcccggcacgcgtccctccagaacctccaccttgggcggggaacgggccccgccgccgtcctccggcccgacggcttccgggtagtcgtcctcctcgtactgcagctcctctaggaacagcggcgacggcgccacccgcgaaccgccgacccgccccaaaatagcccgcgcgtcgacgggacccaggtatcccccctgccgggcctgcggaggaccgcggggaacctcatcatcatcgtccaggcgaccgcgcaccgactggctacgggccgcatcgggcccggggcgctgccgggacgctcggcgatgggatgtgggcggggcttccgacgcgcgccgtcgtcgggctcgcgggccttcccgtcgacggcgcacgggcggctcgtcgcccgccatctcctccagagcctctagctcgctgtcgtcatccccgcggaacaccgcacgcaggtaccccatgaaccccaccccatcgcccgctggctcgtccgccacgggcgaggcgcgggggcgggtggatgcgcgcctcctgcgccccgcgggttcgcgagccgacatggtggcgatagacgcgggttatcggatgtccgctaccccccaaaaaagaaaaagaccccacagcgcggatggaggccggggtaggtgccgccggaccccctcgcgatgggaatggacgggagcgacggggccggcgcaaaaaaacgcagtatctcccgcgaaggctacccgccgccccagcccccggccaaatgcggaaacggtcccgcgctctcgcctttatacgcgggccgccctgcgacacaatcacccgtccgtggtttcgaatctacacgacaggcccgcagacgcggctaacacacacgccggcaacccagaccccagtgggttggttgcgcggtcccgtctcctggctagttctttcccccaccaccaaataatcagacgacaaccgcaggttttgtaatgtatgtgctcgtgtttattgtggatacgaaccggtgacgggaggggaaaacccagacgggggatgcgggtccggtcgcgccccctacccaccgtactcgtcaattccaagggcatcggtaaacatctgctcaaactcgaagtcggccatatccagagcgccgtagggggcggagtcgtggggggtaaatcccggccccggggaatccccgtcccccaacatgtccagatcgaaatcgtctagcgcgtcggcatgcgccatcgccacgtcctcgccgtctaagtggagctcgtcccccaggctgacatcggtcgggggggccgtcgacagtctgcgcgtgtgtcccgcggggagaaaggacaggcgcggagccgccagccccgcctcttcgggggcgtcgtcgtccgggagatcgagcaggccctcgatggtagacccgtaattgtttttcgtacgcgcgcggctgtacgcgtgttcccgcatgaccgcctcggagggcgaggtcgtgaagctggaatacgagtccaacttcgcccgaatcaacaccataaagtacccagaggcgcgggcctggttgccatgcagggtgggaggggtcgtcaacggcgcccctggctcctccgtagccgcgctgcgcaccagcgggaggttaaggtgctcgcgaatgtggtttagctcccgcagccggcgggcctcgattggcactccccggacggtgagcgctccgttgacgaacatgaagggctggaacagacccgccaactgacgccagctctccaggtcgcaacagaggcagtcaaacaggtcgggccgcatcatctgctcggcgtacgcggcccataggatctcgcgggtcaaaaatagatacaaatgcaaaaacaaaacacgcgccagacgagcggtctctcggtagtacctgtccgcgatcgtggcgcgcagcatttctcccaggtcgcgatcgcgtccgcgcatgtgcgcctggcggtgcagctgccggacgctggcgcgcaggtaccggtacagggccgagcagaagttggccaacacggttcgatagctctcctcccgcgcccgtagctcggcgtggaagaaacgagagagcgcttcgtagtagagcccgaggccgtcgcgggtggccggaagcgtagggaaggccacgtcgccgtgggcgcgaatgtcgatttgggtgcgttcggggacgtacgcgtccccccattccaccacatcgctgggcagcgttgataggaatttacactcccggtacaggtcggcgttggtcggtagcgccgaaaacagatcctcgttccaggtatcgagcatggtacatagcgcggggcccgcgctaaagcccaagtcgtcgaggagacggttaaagagggcggcgggggggacgggcatgggtggggagggcatgagctgggcctggctcaggcgccccgttgcgtacagcgggggggccgccggggtgtttttgggacccccggccgggcgggggggcggtggcgaagcgccgtccgcgttcatgtcggcaaacagctcgtcgaccaagaggtccattgggtggggttgatacgggaaagacgatatcgggcttttgatgcgatcgtccccgcccgcccagagagtgtgggacgcccgacggcgcgggaagagaaaacccccaaacgcgttagaggaccggacggaccttatggggggaagtgggcagcgggaaccccgtccgttcccgaggaatgacagcccgtggtcgccaccacgcatttaagcaacccgcacgggccgccccgtacctcgtgacttccccccacattggctcctgtcacgtgaaggcgaaccgagggcggctgtccaacccaccccccgccacccagtcccggtccccgtcggattgggaaacaaaggcacgcaacgccaacaccgaatgaacccctgttggtgctttattgtctgggtacggaagttttcactcgacgggccgtctggggcgagaagcggagcgggctggggctcgaggtcgctcggtggggcgcgacgccgcagaacgccctcgagtcgccgtggccgcgtcgacgtcctgcaccacgtctggattcaccaactcgttggcgcgctgaagcaggtttttgccctcgcagaccgtcacgcggatggtggtgatgccaaggagttcgttgaggtcttcgtctgtgcgcggacgcgacatgtcccagagctggaccgccgccatccgggcatgcatggccgccaggcgcccgaccgcggcgcagaagacgcgcttgttaaagccggccacccggggggtccatggcgcgtcggggtttgggggggcggtgctaaagtgcagctttctggccagcccctgcgcgggtgtcttggatcgggttggcgccgtcgacgcgggggcgtctgggagtgcggcggattctggctgggccgatttcctgccgcgggtggtctccgccgccggggccgcgggggccttagtcgccacccgctgggttcggggggcccggggggcggtggtgggtgtgcgtccggcccctccggacccagcgggtggcggaggcgcccgcgcaggccccgggccggacaaaaccgccccggaaacgggacgccgcgtccgggggacctccgggtgttcgtcgtcttcggatgacgagcccccgtagagggcataatccgactcgtcgtactggacgaaacggacctcgcccctctggcgcgagcgtgtctgtagggcgccacggcgggaggtgtcaggcggactatcgggactcgccatacctgaagacggggtgtagtacagatcctcgtactcatcgcgcggaacctcccgcggacccgacttcacggagcggcgagaggtcatggttccacgaacacgctagggtcggatgcgcggacaattaggcctgggttcggacggcgggggtggtgcaggtgtggagaggtcgagcgataggggcggcccgggagagaagagagggtccgcaaaacccactggggatgcgtgagtggccctctgtgggcggtgggggagagtcttataggaagtgcatataaccacaacccatgggtctaaccaatccccaggggccaagaaacagacacgccccaaacggtctcggtttccgcgaggaaggggaagtcctgggacaccctccacccccacccctcaccccacacagggcgggttcaggcgtgcccggcagccagtagcctctggcagatctgacagacgtgtgcgataatacacacgcccatcgaggccatgcctacataaaagggcaccagggcccccggggcagacatttggccagtgttttgggtctcgcaccgcgcgcccccgatcccatcgcgcccgccctcctcgccgggcggctccccgcgcgggcccgcgtctcccgccgctaaggcgacgagcaagacaaacaacaggcccgcccgacagacccttctgggggggcccatcgtccctaacaggaagatgagtcagtggggatccggggcgatccttgtccagccggacagcttgggtcgggggtacgatggcgactggcacacggccgtcgctactcgcgggggcggagtcgtgcaactgaacctggtcaacaggcgcgcggtggcttttatgccgaaggttagcggggactccggatgggccgtcgggcgcgtctctctggacctgcgaatggctatgccggctgacttttgcgcgattattcacgcccccgcgctagccagccccgggcaccacgtaatactgggtcttatcgactcggggtaccgcggaaccgttatggccgtggtcgtagcgcctaaaaggacgcgggaatttgcccccgggaccctgcgggtcgacgtgacgttcctggacatcctggcgacccccccggccctcaccgagccgatttccctgcggcagttcccgcaactggcgcccccccctccaaccggggccgggatacgcgaagatccttggttggagggggcgctcggggccccaagcgtgactacggccctaccggcgcgacgccgagggcggtccctcgtctatgccggcgagctgacgccggttcagacggaacacggggacggcgtacgagaagccatcgccttccttccaaaacgcgaggaggatgccggtttcgacattgtcgtccgtcgcccggtcaccgtcccggcaaacggcaccacggtcgtgcagccatccctccgcatgctccacgcggacgccgggcccgcggcctgctatgtgttggggcggtcgtcgctcaacgcccgcggcctcctggtcgttcctacgcgctggctccccgggcacgtatgtgcgtttgttgtttacaaccttacgggggttcctgtgaccctcgaggccggcgccaaggtcgcccagctcctggttgcgggggcggacgctcttccttggatccccccggacaactttcacgggaccaaagcgcttcgaaactaccccaggggtgttccggactcaaccgccgaacccaggaacccgccgctcctggtgtttacgaacgagtttgacgcggaggcccccccgagcgagcgcgggaccgggggttttggctctaccggtatttagcccacagctttgggttcgttccgggcaataaaaaacgtttgtatcgcatctttcctgtgtgtagttgtttatgttggatgcctgtgggtctatcacacccgcccctccatcccacaaacacaaaacacacgggttggatgaaaacacgcatttattgacccaaaacacacggagctgctcgagatgggccagggcgaggtgcggttggggaggctgtaggtctgggaacggacacgcggggacacgattccggtttggggtccgggagggcgtcgccgtttcgggcggcaggcgccagcgtaacctccgggggcggcgtgtgggggtgccccaaggagggcgcctcggtcaccccaatcccccccgaccgggttcccccggcaaccccgaaggcggagaggccaagggcccgttcggcgatggccacatcctccatgaccacgtcactctcggccatgctccgaatagcctgggagacgagcacatccgcggacttgtcagccgcccccacggacatgtacatctgcaggatggtggccatacacgtgtccgccaggcgccgcatcttgtcctgatgggccgccacggccccgtcgatcgtgggggcctcgagcccggggtggtggcgcgccagtcgttctaggttcaccatgcaggcgtggtacgtgcgggccaaggcgcgggccttcacgaggcgtcgggtgtcgtccagggaccccagggcgtcatcgagcgtgatgggggcgggaagtagcgcgttaacgaccgccagggcctcctgcagccgcggctccgcctccgagggcggaacggccgcgcggatcatctcatattgttcctcggggcgcgctccccagccacatatagccccgagaagagaagccatcgcgggcgggtactggcccttgggcgcgcggacgcaatggggcaggaagacgggaaccgcggggagaggcgggcggccgggactcccgtggaggtgaccgcgctttatgcgaccgacgggtgcgttattacctcttcgatcgccctcctcacaaactctctactgggggccgagccggtttatatattcagctacgacgcatacacgcacgatggccgtgccgacgggcccacggagcaagacaggttcgaagagagtcgggcgctctaccaagcgtcgggcgggctaaatggcgactccttccgagtaaccttttgtttattggggacggaagtgggtgggacccaccaggcccgcgggcgaacccgacccatgttcgtctgtcgcttcgagcgagcggacgacgtcgccgcgctacaggacgccctggcgcacgggaccccgctacaaccggaccacatcgccgccaccctggacgcggaggccacgttcgcgctgcatgcgaacatgatcctggctctcaccgtggccatcaacaacgccagcccccgcaccggacgcgacgccgccgcggcgcagtatgatcagggcgcgtccctacgctcgctcgtggggcgcacgtccctgggacaacgcggccttaccacgctatacgtccaccacgaggtgcgcgtgcttgccgcgtaccgcagggcgtattatggaagcgcgcagagtcccttctggtttcttagcaaattcgggccggacgaaaaaagcctggtgctcaccactcggtactacctgcttcaggcccagcgtctggggggcgcgggggccacgtacgacctgcaggccatcaaggacatctgcgccacctacgcgattccccacgccccccgccccgacaccgtcagcgctgcgtccctgacctcgtttgccgccatcacgcggttctgttgcacgagccagtacgcccgcggggccgcggcggccgggtttccgctttacgtggagcgccgtattgcggccgacgtccgcgagaccagtgcgctggagaagttcataacccacgatcgcagttgcctgcgcgtgtccgaccgtgaattcattacgtacatctacctggcccattttgagtgtttcagccccccgcgcctagccacgcatcttcgggccgtgacgacccacgaccccaaccccgcggccagcacggagcagccctcgcccctgggcagggaggccgtggaacaatttttttgtcacgtgcgcgcccaactgaatatcggggagtacgtcaaacacaacgtgaccccccgggagaccgtcctggatggcgatacggccaaggcctacctgcgcgctcgcacgtacgcgcccggggccctgacgcccgcccccgcgtattgcggggccgtggactccgccaccaaaatgatggggcgtttggcggacgccgaaaagctcctggtcccccgcgggtggcccgcgtttgcgcccgccagtcccggggaggacacggcgggcggcacgccgcccccacagacctgcggaattgtcaagcgcctcctgagactggccgccacggaacagcagggccccacacccccggcgatcgcggcgcttatccgtaatgcggcggtgcagactcccctgcccgtctaccggatatccatggtccccacgggacaggcatttgccgcgctggcctgggacgactgggcccgcataacgcgggacgctcgcctggccgaagcggtcgtgtccgccgaagcggcggcgcaccccgaccacggcgcgctgggcaggcggctcacggatcgcatccgcgcccagggccccgtgatgccccctggcggcctggatgccggggggcagatgtacgtgaatcgcaacgagatattcaacggcgcgctggcaatcacaaacatcatcctggatctcgacatcgccctgaaggagcccgtcccctttcgccggctccacgaggccctgggccactttaggcgcggggctctggctgcggttcagctcctgtttcccgcggcccgcgtggaccccgacgcatatccctgttattttttcaaaagcgcatgtcggcccggcccggcgtccgtgggttccggcagcggactcggcaacgacgacgacggggactggtttccctgctacgacgacgccggtgatgaggagtgggcggaggacccgggcgccatggacacatcccacgatcccccggacgacgaggttgcctactttgacctgtgccacgaagtcggccccacggcggaacctcgcgaaacggattcgcccgtgtgttcctgcaccgacaagatcggactgcgggtgtgcatgcccgtccccgccccgtacgtcgtccacggttctctaacgatgcggggggtggcacgggtcatccagcaggcggtgctgttggaccgagattttgtggaggccatcgggagctacgtaaaaaacttcctgttgatcgatacgggggtgtacgcccacggccacagcctgcgcttgccgtattttgccaaaatcgcccccgacgggcctgcgtgcggaaggctgctgccagtgtttgtgatcccccccgcctgcaaagacgttccggcgtttgtcgccgcgcacgccgacccgcggcgcttccattttcacgccccgcccacctatctcgcttccccccgggagatccgtgtcctgcacagcctgggtggggactatgtgagcttctttgaaaggaaggcgtcccgcaacgcgctggaacactttgggcgacgcgagaccctgacggaggtcctgggtcggtacaacgtacagccggatgcgggggggaccgtcgaggggttcgcatcggaactgctggggcggatagtcgcgtgcatcgaaacccactttcccgaacacgccggcgaatatcaggccgtatccgtccggcgggccgtcagtaaggacgactgggtcctcctacagctagtccccgttcgcggtaccctgcagcaaagcctgtcgtgtctgcgctttaagcacggccgggcgagtcgcgccacggcgcggacattcgtcgcgctgagcgtcggggccaacaaccgcctgtgcgtgtccttgtgtcagcagtgctttgccgccaaatgcgacagcaaccgcctgcacacgctgtttaccattgacgccggcacgccatgctcgccgtccgttccctgcagcacctctcaaccgtcgtcttgataacggcgtacggcctcgtgctcgtgtggtacaccgtcttcggtgccagtccgctgcaccgatgtatttacgcggtacgccccaccggcaccaacaacgacaccgccctcgtgtggatgaaaatgaaccagaccctattgtttctgggggccccgacgcacccccccaacgggggctggcgcaaccacgcccatatctgctacgccaatcttatcgcgggtagggtcgtgcccttccaggtcccacctgacgccatgaatcgtcggatcatgaacgtccacgaggcagttaactgtctggagaccctatggtacacacgggtgcgtctggtggtcgtagggtggttcctgtatctggcgttcgtcgccctccaccaacgccgatgtatgtttggcgtcgtgagtcccgcccacaagatggtggccccggccacctacctcttgaactacgcaggccgcatcgtatcgagcgtgttcctgcagtacccctacacgaaaattacccgcctgctctgcgagctgtcggtccagcggcaaaacctggttcagttgtttgagacggacccggtcaccttcttgtaccaccgccccgccatcggggtcatcgtaggctgcgagttgatgctacgctttgtggccgtgggtctcatcgtcggcaccgctttcatatcccggggggcatgtgcgatcacataccccctgtttctgaccatcaccacctggtgttttgtctccaccatcggcctgacagagctgtattgtattctgcggcggggcccggcccccaagaacgcagacaaggccgccgccccggggcgatccaaggggctgtcgggcgtctgcgggcgctgctgttccatcatcctctcgggcatcgcagtgcgattgtgttatatcgccgtggtggccggggtggtgctcgtggcgcttcactacgagcaggagatccagaggcgcctgtttgatgtatgacgtcacatccaggccggcggaaaccgtaacggcatatgcaaattggaaactgtcctgtcttggggcccacccacccgacgcgtcatatgcaaatgaaaatcggtcccccgaggccacgtgtagcctggatcccaacgaccccgcccatgggtcccaattggccgtcccgttaccaagaccaacccagccagcgtatccacccccgcccgggtccccgcggaagcggaacggggtatgtgatatgctaattaaatacatgccacgtacttatggtgtctgattggtccttgtctgtgccggaggtggggcgggggccccgcccggggggcggaacgaggaggggtttgggagagccggccccggcaccacgggtataaggacatccaccacccggccggtggtggtgtgcagccgtgttccaaccacggtcacgcttcggtgcctctccccgattcgggcccggtcgctcgctaccggtgcgccaccaccagaggccatatccgacaccccagccccgacggcagccgacagcccggtcatggcgactgacattgatatgctaattgacctcggcctggacctctccgacagcgatctggacgaggacccccccgagccggcggagagccgccgcgacgacctggaatcggacagcagcggggagtgttcctcgtcggacgaggacatggaagacccccacggagaggacggaccggagccgatactcgacgccgctcgcccggcggtccgcccgtctcgtccagaagaccccggcgtacccagcacccagacgcctcgtccgacggagcggcagggccccaacgatcctcaaccagcgccccacagtgtgtggtcgcgcctcggggcccggcgaccgtcttgctcccccgagcagcacgggggcaaggtggcccgcctccaacccccaccgaccaaagcccagcctgcccgcggcggacgccgtgggcgtcgcaggggtcggggtcgcggtggtcccggggctgccgatggtttgtcggacccccgccggcgtgcccccagaaccaatcgcaaccctgggggaccccgccccggggcggggtggacggacggccccggcgccccccatggcgaggcgtggcgcggcagtgagcagcccgacccacccggaggccagcggacacggggcgtgcgccaagcaccccccccgctaatgacgctggcgattgcccccccgcccgcggacccccgcgccccggccccggagcgaaaggcgcccgccgccgacaccatcgacgccaccacgcggttggtcctgcgctccatctccgagcgcgcggcggtcgaccgcatcagcgagagctttggccgcagcgcacaggtcatgcacgacccctttggggggcagccgtttcccgccgcgaatagcccctgggccccggtgctggcgggccaaggagggccctttgacgccgagaccagacgggtctcctgggaaaccttggtcgcccacggcccgagcctctatcgcacttttgccggcaatcctcgggccgcatcgaccgccaaggccatgcgcgactgcgtgctgcgccaagaaaatttcatcgaggcgctggcctccgccgacgagacgctggcgtggtgcaagatgtgcatccaccacaacctgccgctgcgcccccaggaccccattatcgggacggccgcggctgtgctggataacctcgccacgcgcctgcggccctttctccagtgctacctgaaggcgcgaggcctgtgcggcctggacgaactgtgttcgcggcggcgtctggcggacattaaggacattgcatccttcgtgtttgtcattctggccaggctcgccaaccgcgtcgagcgtggcgtcgcggagatcgactacgcgacccttggtgtcggggtcggagagaagatgcatttctacctccccggggcctgcatggcgggcctgatcgaaatcctagacacgcaccgccaggagtgttcgagtcgtgtctgcgagttgacggccagtcacatcgtcgcccccccgtacgtgcacggcaaatatttttattgcaactccctgttttaggtacaataaaaacaaaacatttcaaacaaatcgcccctcgtgttgtccttctttgctcatggccggcggggcgtgggtcacggcagatggcgggggtgggcccggcgtacggcctgggtgggcggagggaactaacccaacgtataaatccgtccccgttccaaggccggtgtcatagtgcccttaggagcttcccgcccgggcgcatccccccttttgcactatgacagcgacccccctcaccaacctgttcttacgggccccggacataacccacgtggcccccccttactgcctcaacgccacctggcaggccgaaacggccatgcacaccagcaaaacggactccgcttgcgtggccgtgcggagttacctggtccgcgcctcctgtgagaccagcggcacaatccactgctttttctttgcggtatacaaggacacccaccacacccctccgctgattaccgagctccgcaactttgcggacctggttaaccacccgccggtcctacgcgaactggaggataagcgcggggtgcggctgcggtgtgcgcggccgtttagcgtcgggacgattaaggacgtctctgggtccggcgcgtcctcggcgggagagtacacgataaacgggatcgtgtaccactgccactgtcggtatccgttctcaaaaacatgctggatgggggcctccgcggccctacagcacctgcgctccatcagctccagcggcatggccgcccgcgcggcagagcatcgacgcgtcaagattaaaattaaggcgtgatctccaacccccccatgaatgtgtgtaaccccccccaaaaaaataaagagccgtaacccaaccaaaccaggcgtggtgtgagtttgtggacccaaagccctcagagacaacgcgacaggccagtatggaccgtgatacttttatttattaactcacaggggcgcttaccgccacaggaataccagaataatgaccaccacaatcgcgaccaccccaaatacagcatggcgccacaccacgccacaacagccctgtcgccggtatggggcatgatcagacgagccgcgcgccgcgcgttgggccctgtacagctcgcgcgaattgaccctaggaggccgccacgcgcccgagttttgcgttcgtcgctggtcgtcgggcgccaaagccccggacggctgttcggtcgaacgaacggccacgacagtggcataggttggggggtggtccgacatagcctcggcgtacgtcgggaggcccgacaagaggtcccttgtgatgtcgggtggggccacaagcctggtttccggaagaaacaggggggttgccaataacccgccagggccaaaactccggcgctgcgcacgtcgttcggcgcggcgccgggcgcgccgagcggctcgctgggcggcttggcgtgagcggccccgctccgacgcctcgccctctccggaggaggttggcggaattggcacggacaacaggggcccagcagagtacggtggaggtgggtccgtgggggtgtccagatcaataacgacaaacggcccctcgttcctaccagacaagctatcgtaggggggcgggggatcagcaaacgcgttccccgcgctccataaacccgcgtcgggttgcgccgcctccgaagccatggatgcgccccaaagccacgactcccgcgcgctaggtccttggggtaatggaaaaggccctactccccatccaagccagccaagttaacgggctacgccttcgggaatgggactggcaccccggcggattttgttgggctggcatgcgtcgcccaaccgagggccgcgtccacgggacgcgccttttataaccccgggggtcattcccaacgatcacatgcaatctaactggctcccctctccccccctctcccctctccccccctctcccctctccccccctctcccctctccccccctctcccctctccccccctctcccctctccccccctctcccctctccccccctctcccctctccccccctctcccctctccccccctctcccctctccccccctctcccctctcccctctgctctttccccgtgacacccgacgctgggggcgtggctgccgggaggggccgcggatgggcgggcctacttggtctcccgccccccccccccccccccgaaccgccccgccggctttgcccccctttgatcccctgctacccccaacccgtgctggtggtgcgggttggggggggatgtgggcgggggtgcgcgggaggtgtcggtggtggtggtggtggtggtagtaggaatggtggtgagggggggggggcgctggttggtcaaaaaagggagggacgggggccggcagaccgacggcgacaacgctccccggcggccgggtcgcggctcttacgagcggcccggcccgcgctcccaccccccgggccgtgtccttgctttccccccgtctcccccccccccgccttctcctcctcctcctcgtttttccaaaccccgcccacccggcccggcccggcccggcccggcccggccaccgccgcccacccacccacctcgggatacccagccccggtcccccgttccccgggggccgttatctccagcgccccgtccggcgcgccgccccccgccgctaaaccccatcccgcccccgggaccccacatataagcccccagccacacgcaagaacagacacgcagaacggctgtgtttatttaaataaaccaatgtcggaataaacaaacacaaacacccgcgacggggggacggaggggacggagggagggggtgacgggggacgggaacagacacaaaaacaaccacaaaaaacaaccacccaccgacacccccaccccagtctcctcgccttctcccacccaccccacgcccccactgagcccggtcgatcgacgagcacccccgcccacgcccccgcccctgccccggcgacccccggcccgcacgatcccgacaacaataacaaccccaacggaaagcggcggggtgttgggggaggcgaggaacaaccgaggggaacgggggatggaaggacgggaagtggaagtcctgatacccatcctacacccccctgccttccaccctccggccccccgcgagtccacccgccggccggctaccgagaccgaacacggcggccgccgcagccgccgcagccgccgccgacaccgcagagccggcgcgcgcactcacaagcggcagaggcagaaaggcccagagtcattgtttatgtggccgcgggccagcagacggcccgcgacaccccccccccgcccgtgtgggtatccggccccccgccccgcgccggtccattaagggcgcgcgtgcccgcgagatatcaatccgttaagtgctctgcagacaggggcaccgcgcccggaaatccattaggccgcagacgaggaaaataaaattacatcacctacccacgtggtgctgtggcctgtttttgctgcgtcatctcagcctttataaaagcgggggcgcggccgtgccgatcgcgggtggtgcgaaagactttccgggcgcgtccgggtgccgcggctctccgggcccccctgcagccggggcggccaaggggcgtcggcgacatcctccccctaagcgccggccggccgctggtctgttttttcgttttccccgtttcgggggtggtgggggttgcggtttctgtttctttaacccgtctggggtgtttttcgttccgtcgccggaatgtttcgttcgtctgtcccctcacggggcgaaggccgcgtacggcccgggacgaggggcccccgaccgcggcggtccgggccccgtccggacccgctcgccggcacgcgacgcgaaaaaggccccccggaggcttttccgggttcccggcccggggcctgagatgaacactcggggttaccgccaacggccggcccccgtggcggcccggcccggggccccggcggacccaaggggccccggcccggggccccacaacggcccggcgcatgcgctgtggtttttttttcctcggtgttctgccgggctccatcgcctttcctgttctcgcttctccccccccccttcttcacccccagtaccctcctccctcccttcctcccccgttatcccactcgtcgagggcgccccggtgtcgttcaacaaagacgccgcgtttccaggtaggttagacacctgcttctccccaatagaggggggggacccaaacgacagggggcgccccagaggctaaggtcggccacgccactcgcgggtgggctcgtgttacagcacaccagcccgttcttttccccccctcccacccttagtcagactctgttacttacccgtccgaccaccaactgcccccttatctaagggccggctggaagaccgccagggggtcggccggtgtcgctgtaaccccccacgccaatgacccacgtactccaagaaggcatgtgtcccaccccgcctgtgtttttgtgcctggctctctatgcttgggtcttactgcctggggggggggagtgcgggggagggggggtgtggaaggaaatgcacggcgcgtgtgtaccccccctaaagttgttcctaaagcgaggatacggaggagtggcgggtgccgggggaccggggtgatctctggcacgcgggggtgggaagggtcgggggagggggggatggagtaccggcccacctggccggcgcgggtgcgcgtgcctttgcacaccaaccccacgtcccccggcggtctctaagaagcaccgccccccctccttcataccaccgagcatgcctgggtgtgggttggtaaccaacacgcccatcccctcgtctcctgtgattctctggctgcaccgcattcttgttttctaactatgttcctgtttctgtctcccccccccccacccctccgccccaccccccaacacccacgtctgtggtgtggccgacccccttttgggcgccccgtcccgccccgccacccctcccatcctttgttgccctatagtgtagttaaccccccccgccctttgtggcggccagaggccaggtcagtccgggcgggcaggcgctcgcggaaacttaacacccacacccaacccactgtggttctggctccatgccagtggcaggatgctttcggggatcggtggtcaggcagcccgggccgcggctctgtggttaacaccagagcctgcccaacatggcacccccactcccacgcacccccactcccacgcacccccactcccacgcacccccactcccacgcacccccactcccacgcacccccactcccacgcacccccactcccacgcacccccactcccacgcacccccactcccacgcatccccgcgatacatccaacacagacagggaaaagatacaaaagtaaacctttatttcccaacagacagcaaaaatcccctgagtttttttttattagggccaacacaaaagacccgctggtgtgtggtgcccgtgtctttcacttttcccctccccgacacggattggctggtgtagtgggcgcggccagagaccacccagcgcccgacccccccctccccacaaacacggggggcgtcccttattgttttccctcgtcccgggtcgacgccccctgctccccggaccacgggtgccgagaccgcaggctgcggaagtccagggcgcccactagggtgccctggtcgaacagcatgttccccacgggggtcatccagaggctgttccactccgacgcgggggccgtcgggtactcggggggcatcacgtggttacccgcggtctcggggagcagggtgcggcggctccagccggggaccgcggcccgcagccgggtcgccatgtttcccgtctggtccaccaggaccacgtacgccccgatgttccccgtctccatgtccaggatgggcaggcagtcccccgtgatagtcttgttcacgtaaggcgacagggcgaccacgctagagacccccgagatgggcaggtagcgcgtgaggccgcccgcggggacggccccggaagtctccgcgtggcgcgtcttccgggcacacttcctcggcccccgcggcccagaagcagcgcgggggccgagggaggtttcctcttgtctccctcccagggcaccgacggccccgcccgaggaggcggaagcggaggaggacgcggccccggcggcggaagaggcggcccccgcgggggtcggggccgaggaggaagaggcagaggaggaagaggcggaggccgccgaggacgtcaggggggtcccgggcccaccctggccgcgcccccccggccctgagtcggagggggggtgcgtcgccgccctcttggcccctgccggcgcgagggggggacgcgtggactggggggaggggttttcctggcccgacccgcgcctcttcctcggacgcaccgccgcctcctgctcgacagaggcggcggaggggagcggggcggcgccggagggggcggcgccgcgggagggcccgtgcccaccctccacgcccggcccccccgagccgcgcgccaccgtcgcacgcgcccggcacagactctgttcttggttcgcggcctgagccagggacgagtgcgactggggcacacggcgcgcgtccgcggggcgggcggccggctccgccccgggggccggggcgcgggggccgggccccggaggcggcgctcgcacgcacggggccacggccgcgcgggggcgcgcgggtcccgacgcggccgcggacgcggggggcccggggcggggggcggagcctggcatgggcgccgcggggggcctgtggggagaggccgggggggagtcgctgatcactatggggtctctgttgtttgcaaggggggcgggtctgttgacaagggggcccgtccggcccctcggccgccccgcctccgcttcaacaaccccaaccccaaccccaacccccccggaggggccagacgccccccgcggcgccgcggctcgcgactggcgggagccgccgccgccgctgctgttggtggtggtgttggtgttactgctgccgtgtggcccgatgggcgccgaggggggcgctgtccgagccgcggccggctggggggctgcgtgagacgccccgcccgtcacggggggcgcggcggcgcctctgcgtgggggggcgcggggcgtccggcggggggcgggcggtacgtagtctgctgcaagagacaacggggggcgcgatcaggttacgccccctccccggcccgccctttcctcgcccgcccgcctattcctccctccccccccctcctcctcctcctcccccagggtccttgccgccccccgcctcaccgtcgtccaggtcgtcgtcatcctcgtccgtggtgggctccgggtgggtgggcgacagggccctcaccgtgtgcccccccagggtcaggtaccgcggggcgaaccgctgattgcccgtccagataaagtccacggccgtgcccgccctgacggcctcctcggcctccatgcgggtctgggggtcgttcacgatcgggatggtgctgaacgacccgctgggcgtcacgcccactatcaggtacaccagcttggcgttgcacagcgggcaggtgttgcgcaattgcatccaggttttcatgcacgggatgcagaagcggtgcatgcacgggaaggtgtcgcagcgcaggtggggcgcgatctcatccgtgcacacggcgcacacgtcgccctcgtcgctccccccgtcctctcgagggggggcgcccccgcaactgccggggtcttcctcgcggggggggctcccccccgagaccgcccccccatccacgccctgcggccccagcagccccgtctcgaacagttccgtgtccgtgctgtccgcctcggaggcggagtcgtcgtcatggtggtcggcgtccccccgcccccccacttcggtctccgcctcagagtcgctgctgtccggcaggtctcggtcgcagggaaacacccagacatccggggcgggctaaggggaaaaaaggggggcgggtaagaatggggggggatttcccgcgtcaatcagcacccacgagttccccctctcccccccccgcctcacaaagtcctgcccccctgctggcctcggaagaggggggagaaaggggtctgcaaccaaaggtggtctgggtccgtcctttggatcccgacccctcttcttccctcttctcccgccctccagacgcaccggagtcgggggtcccacggcgtcccccaaatatggcgggcggctcctccccacccccctagatgcgtgtgagtaaggggggcctgcgtatgagtcagtggggaccacgcccccaacacggcgaccccggtccctgtgtgtttgttgtgggggcgtgtctctgtgtatgagtcagggggtcccacggcgaccccgggccctgcgtctgagtcaaaggggccatgtgtatgtgttgggggtctgtatatataaagtcagggggtcacatggcgacccccaacagggcgaccccggtccctgtatatatagggtcagggggttccgcaccccctaacatggcgcccccggtccctgtatatatagtgtcacggggttccacgccccctaacatggcgccccaacatggcgcccggctcccgtgtatgagtgggggtcccccaacatggcggccggttccagtgtaagggtcgggggtcccccaacatggcgccccccaatatggcgccccccaatatggcgccccagacatggcgcccggcccctcacctcgcgctgggggcggccctcaggccggcgggtactcgctccggggcggggctccatgggggtcgtatgcggctggagggtcgcggacggagggtccctgggggtcgcaacgtaggcggggcttctgtggtgatgcggagagggggcggcccgagtctgcctggctgctgcgtctcgctccgagtgccgaggtgcaaatgcgaccagactgtcgggccagggctaacttataccccacgcctttcccctccccaaaggggcggcagtgacgattcccccaatggccgcgcgtcccaggggaggcaggcccaccgcggggcggccccgtccccggggaccaacccggcgcccccaaagaatatcattagcatgcacggcccggcccccgatttgggggcccaacccggtgtcccccaaagaaccccattagcatgcccctcccgccgacgcaacaggggcttggcctgcgtcggtgccccggggcttcccgccttcccgaagaaactcattaccatacccggaaccccaggggaccaatgcgggttcattgagcgacccgcgggccaatgcgcgaggggccgtgtgttccgccaaaaaagcaattagcataacccggaaccccaggggagtggttacgcgcggcgcgggaggcggggaataccggggttgcccattaagggccgcgggaattgccggaagcgggaagggcggccggggccgcccattaatgagtttctaattaccataccgggaagcggaacaaggcctcttgcaagtttttaattaccataccgggaagtgggcggcccggcccattgggcggtaactcccgcccaatgggccgggccccgaagactcggcggacgctggttggccgggccccgccgcgctggcggccgccgattggccagtcccgcccccgaggcgggcccgccctgtgagggcgggctggctccaagcgtatatatgcgcggctcctgccatcgtctctccggagagcggcttggtgcggagctcccgggagctccgcggaagacccaggccgcctcgggtgtaacgcgggggcggcgggggccgcgatggcggcggcggcgggccatggagacagagagcgtgccggggtggtagagtttgacaggcaagcatgtgcgtgcagaggcgagtagtgcttgcctgtctaactcgctagtctcggccgcggggggcccgggctgcccgccgccgccgctttaaagggccgcgcgcgacccccggggggtgtgttttggggggggcccgttttcggggtctggccgctcctccccccgctcctccccccgctcctccccccgctcctccccccgctcctccccccgctcctccccccgctcctccccccgctcctccccccgctcctccccccgctcctccccccgctcctccccccgctcctccccccgctcctccccccgctcctccccccgctcctccccccgctcctccccccgctcctccccccgctcctccccccgctcccgcggccccgccccccacgcccgccgcgcgcgcgcacgccgcccggaccgccgcccgccttttttgcgcgcgcgcgcgcccgcggggggcccgggctgccacaggtgaaaccaacagagcacggcgcactccgcacgtcacacgtcacgtcatccaccacacctgcccaacaacacaactcacagcgacaactcaccgcgcaacaactcctgttcctcatccacacgtcaccgcgcacctcccgctcctccagacgtaccccggcgcaacacaccgctcctgctacacaccaccgcccctccccagccccagccctccccggccccagccctccccggccccagccctccccggccccagccctccccggccccagccctccccggccccagccctccccggccccagccctccccggccccagccctccccggccgcgtcccgcgctccctcgggggggttcgggcatctctacctcagtgccgccaatctcaggtcagagatccaaaccctccgggggcgcccgcgcaccaccaccgcccctcgccccctcccgcccctcgccccctcccgcccctcgccccctcccgcccctcgccccctcccgcccctcgccccctcccgcccctcgccccctcccgcccctcgccccctcccgcccctcgccccctcccgcccctcgccccctcccgcccctcgccccctcccgcccctcgccccctcccgcccctcgccccctcccgcccctcgccccctcccgcccctcgccccctcccgcccctcgccccctcccgcccctcgccccctcccgcccctcgccccctcccgcccctcgccccctcccgcccctcgccccctcccgcccctcgaataaacaacgctactgcaaaacttaatcaggttgttgccgtttattgcgtcttcgggtctcacaagcgccccgccccgtcccggcccgttacagcaccccgtccccctcgaacgcgccgccgtcgtcttcgtcccaggcgccttcccagtccacaacttcccgccgcgggggcgtggccaagcccgcctccgcccccagcacctccacggcccccgccgccgccagcacggtgccgctgcggcccgtggccgaggcccagcgaatcccgggcggcgccggcggcagggcccccgggccgtcgtcgtcgccgcgcagcaccagcgggggggcgtcgtcgtcgggctccagcagggcgcgggcgcaaaagtccctccgcggcccgcgccaccgggccgggccggcgcgcaccgcctcgcgccccagcgccacgtacacgggccgcagcggcgcgcccaggccccagcgcgcgcaggcgcggtgcgagtgggcctcctcctcgcagaagtccggcgcgccgggcgccatggcgtcggtggtccccgaggccgccgcccggccgtccagcgccggcagcacggcccggcggtactcgcgcggggacatgggcaccggcgtgtccgggccgaagcgcgtgcgcacgcggtagcgcacgttgccgccgcggcacaggcgcagcggcggcgcgtcggggtacaggcgcgcgtgcgcggcctccacgcgcgcgaagacccccgggccgaacacgcggcccgaggccagcaccgtgcggcgcaggtcccgcgccgccggccagcgcacggcgcactgcacggcgggcagcagctcgcacgccaggtaggcgtgctgccgcgacaccgcgggcccgtcggcgggccagtcgcaggcgcgcacggtgttgaccacgatgagccgccggtcgccggcgctggcgagcagccccagaaactccacggccccggcgaaggccaggtcccgcgtggacagcagcagcacgccctgtgcgcccagcgccgacacgtcgggggcgccggtccagttgcccgcccaggcggccgtgtccggcccgcacagccggttggccagggccgccagcaggcaggacagcccgccgcgctcggcggaccactccggcggcccccccgaggccccgccgccggccaggtcctcgcccggcagcggcgagtacagcaccaccacgcgcacgtcctcggggtcggggatctggcgcatccaggccgccatgcggcgcagcgggcccgaggcgcgcagggggccaaagaggcggcccccggcggccccgtgggggtgggggttatcgtcgtcgtcgccgccgccgcacgcggcctgggcggcgggggcgggcccggcgcaccgcgcggcgatcgaggccagggcccgcgggtcaaacatgagggccggtcgccaggggacggggaacagcgggtggtccgtgagctcggccacggcgcgcggggagcagtaggcctccagggcggcggccgcgggcgccgccgtgtggctgggccccgggggctgccgccgccagccgcccagggggtcggggccctcggcgggccggcgcgacagcgccacggggcgcgggcgggcctgcgccgcggcggcccggggcgccgcgggctgggcgggggcgggctcgggccccgggggcgtggaggggggcgcgggcgcggggaggggggcgcgggcgtccgagccgggggcgtccgcgccgctcttcttcgtcttcgggggtcgcgggccgccgcctccgggcggccgggccgggccgggactcttgcgcttgcgcccctcccgcggcgcggcggaggcggcggcggccgccagcgcgtcggcggcgtccggtgcgctggccgccgccgccagcagggggcgcaggctctggttgtcaaacagcaggtccgcggcggcggcggccgcggagctcggcaggcgcgggtcccgcggcagcgcggggcccagggccccggcgaccaggctcacggcgcgcacggcggccacggcggcctcgctgccgccggccacgcgcaggtccccgcgcaggcgcatgagcaccagcgcgtcgcgcacgaaccgcagctcgcgcagccacgcgcgcaggcggggcgcgtcggcgtgcggcggcggcggggaagcggggcccgcgggtccctccggccgcggggggctggcgggccgggccccggccagccccgggacggccgccaggtcgccgtcgaagccctcggccagcgcctccaggatcccgcggcaggcggccaggcactcgacggccacgcggccggcctgggcgcggcgcccggcgtcgtcgtcggcgtcggcgtggcgggcggcgtcggggtcgtcgccccccgcgggggaggcgggcgcggcggacagccgccccagggcggcgaggatccccgcggcgccgtacccggcgggcaccgcgcgctcgcccggtgcggcggcggcgacggcggcgaccccctcgtcatctgcgccggcgccggggctccccgcggcccccgtcagcgccgcgttctcgcgcgccaacaggggcgcgtaggcgcggcgcaggctggtcagcaggaagcccttctgcgcgcggtcgtatcggcggctcatggccacggcggccgccgcgtgcgccaggccccagccgaagcggccggccgccatggcgtagcccaggtggggcacggcccgcgccacgctgccggtgatgaaggagctgctgttgcgcgcggcgcccgagatccggaagcaggcctggtccagcgccacgtccccggggaccacgcgcgggttctggagccaccccatggcctccgcgtccggggtgtacagcagccgcgtgatcagggcgtactgctgcgcggcgtcgcccagctcgggcgcccacacggccgccggggcgcccgaggcctcgaaccggcgtcgcgcctcctccgcctcgggcgccccccagaggcccgggcggctgtcgcccaggccgccgtacagcacccgccccgggggcgggggcccggcgccgggccacggctccccgctgacgtacccgtcgcgatagcgcgcgtagaaggcgccggaggccgcgtcggcgtccagctcgacccgccggggctgcccggccgtgaagcggcccgtggcgtcgcggccggccaccgccgcgcgggcccggcggcgctcgatgcggcccgcggaggccgcgggggtcctcgccgccgcccggggcttgggcgcggcctcggagagggggggtggcccgggcgggggcggcgtccgcccgggggctgccggcgccgcgctcgacggaccccgcccgacggcccgcgcctcgcgtgcgtggtcggccgcgtcgttgccgtcgtcgtcctcgtcctcgtcggacgacgaggacgaagaggatgcggacgacgaggacgaggacccggagtccgacgaggtcgatgacgccgatggccgccaccggccgtgacgacgtctccgcggcggctgggccggcgggcgcggcgacaggcggtccgtggggtccggatacgcgccgcgtagcggggcctcccgttcgcggccccgggccggggcccggtcgccggcggcgtcggctgcgtcgtcgtactcgtccccgtcatcgtcgtcggctcgaaaggcgggggtccggggcggcgaggccgcggggtcgggcgtcgggatcgtccggacggcctcctctaccatggaggccagcagagccagctgtcgcggcgagacggcgtccccggcgtcctcgccggcgtcggtgcccgccgcgggggccctcccgtcccgccgggcgtcgtcgaggtcgtgggggtggtcggggtcgtggtcggggtcgtccccgccctcctccgtctccgcgccccacccgagggccccccgctcgtcgcggtctgggctcggggtgggcggcggcccgtcggtggggcccggggagccggggcgctgcttgttctccgacgccatcgccgatgcggggcgatcctccggggatacggctgcgacggcggacgtagcacggtaggtcacctacggactctcgatggggggagggggcgagacccacggaccccgacgacccccgccgtcgacgcggaactagcgcggaccggtcgatgcttgggtgggaaaaaggacagggacggccgatccccctcccgcgcttcgtccgcgtatcggcgtcccggcgcggcgagcgtctgacggtctgtctctggcggtcccgcgtcgggtcgtggatccgtgtcggcagccgcgctccgtgtggacgatcggggcgtcctcgggctcatatagtcccaggggccggcgggaaggaggagcagcggaggccgccggccccccgcccccccggcgggcccaccccgaacggaattccattatgcacgaccccgccccgacgccggcacgccgggggcccgtggccgcggcccgttggtcgaacccccggccccgcccatccgcgccatctgccatgggcggggcgcgagggcgggtgggtccgcgccccgccccgcatggcatctcattaccgcccgatccggcggtttccgcttccgttccgcatgctaacgaggaacgggcagggggcggggcccgggccccgacttcccggttcggcggtaatgagatacgagccccgcgcgcccgttggccgtccccgggccccccggtcccgcccgccggacgccgggaccaacgggacggcgggcggcccaagggccgcccgccttgccgcccccccattggccggcgggcgggaccgccccaagggggcggggccgccgggtaaaagaagtgagaacgcgaagcgttcgcacttcgtcccaatatatatatattattagggcgaagtgcgagcactggcgccgtgcccgactccgcgccggccccgggggcgggcccgggcggcggggggcgggtctctccggcgcacataaaggcccggcgcgaccgacgcccgcagacggcgccggccacgaacgacgggagcggctgcggagcacgcggaccgggagcgggagtcgcagagggccgtcggagcggacggcgtcggcatcgcgacgccccggctcgggatcgggatcgcatcggaaagggacacgcggacgcgggggggaaagacccgcccaccccacccacgaaacacaggggacgcaccccgggggcctccgacgacagaaacccaccggtccgccttttttgcacgggtaagcaccttgggtgggcggaggagggggggacgcgggggcggaggaggggggacgcgggggcggaggaggggggacgcgggggcggaggaggggggacgcgggggcggaggaggggggacgcgggggcggaggagggggctcacccgcgttcgtgccttcccgcaggaggaacgtcctcgtcgaggcgaccggcggcgaccgttgcgtggaccgcttcctgctcgtcgggcggggggaagccactgtggtcctccgggacgttttctggatggccgacatttccccaggcgcttttgcgccttgtgtaaaagcgcggcgtcccgctctccgatccccgcccctgggcacgcgcaagcgcaagcgcccttcccgccccctctcatcggagtctgaggtagaatccgatacagccttggagtctgaggtcgaatccgagacagcatcggattcgaccgagtctggggaccaggatgaagccccccgcatcggtggccgtagggccccccggaggcttggggggcggttttttctggacatgtcggcggaatccaccacggggacggaaacggatgcgtcggtgtcggacgaccccgacgacacgtccgactggtcttatgacgacattcccccacgacccaagcgggcccgggtaaacctgcggctcacgagctctcccgatcggcgggatggggttatttttcctaagatggggcgggtccggtctacccgggaaacgcagccccgggcccccaccccgtcggccccaagcccaaatgcaatgctacggcgctcggtgcgccaggcccagaggcggagcagcgcacgatggacccccgacctgggctacatgcgccagtgtatcaatcagctgtttcgggtcctgcgggtcgcccgggacccccacggcagtgccaaccgcctgcgccacctgatacgcgactgttacctgatgggatactgccgagcccgtctggccccgcgcacgtggtgccgtttgctgcaggtgtccggcggaacctggggcatgcacctgcgcaacaccatacgggaggtggaggctcgattcgacgccaccgcggaacccgtgtgcaagcttccttgtttggagaccagacggtacggcccggagtgtgatcttagtaatctcgagattcatctcagcgcgacaagcgatgatgaaatctccgatgccaccgatctggaggccgccggttcggaccacacgctcgcgtcccagtccgacacggaggatgccccctcccccgttacgctggaaaccccagaaccccgcgggtccctcgctgtgcgtctggaggatgagtttggggagtttgactggaccccccaggagggctcccagccctggctgtctgcggtcgtggccgataccagctccgtggaacgcccgggcccatccgattctggggcgggtcgcgccgcagaagaccgcaagtgtctggacggctgccggaaaatgcgcttctccaccgcctgcccctatccgtgcagcgacacgtttctccggccgtgagtccggtcgccccgacccccttgtatgtccccaaaataaaagaccaaaatcaaagcgtttgtcccagcgtcttaatggcgggaagggcggagagaaacagaccacgcggacatggggggtgtttgggggtttattggcaccgggggctaaagggtggtaaccggatagcagatgtgaggaagtcggggccgttcgccgcgaacggcgatcagagggtcagtttcttgcggaccacggcccggcgatgtgggttgctcgtctgggacctcgggcatgcccatacacgcacaacacggacgccgcaccggatgggacgtcgtaagggggcctggggtagctgggtggggtttgtgcagagcaatcagggaccgcagccagcgcatacaatcgcgctcccgtccgtttgtcccgggcagtaccacgccgtactggtattcgtaccggctgagcagggtctccagggggtggttgggggccgcggggaacggggtccacgccacggtccactcgggcaaaaaccgagtcggcacggcccacggttctcccacccacgcgtctggggtcttgatggcgataaatcttaccccgagccggattttttgggcgtattcgagaaacggcacacacagatccgccgcgcctaccacccacaagtggtagaggcgaggggggctgggttggtctcggtgcagcagtcggaagcacgccacggcgtccacgacctcggtgctctccaaggggctgtcctccgcaaacaggcccgtggtggtgtttggggggcagcgacaggacctagtgcgcacgatcgggcgggtgggtttgggtaagtccatcagcggctcggccaaccgtcgaaggttggccggacgaacgacgaccggggtacccaggggttctgatgccaaaatgcggcactgcctaagcaggaagctccacagggccgggcttgcgtcgacggaagtccggggcagggcgttgttctggtcaaggagggtcattacgttgacgacaacaacgcccatgttggtatattacaggcccgtgtccgatttggggcacttgcagatttgtaaggccacgcacggcggggagacaggccgacgcgggggctgctctaaaaatttaagggccctacggtccacagacccgccttcccgggggggcccttggagcgaccggcagcggaggcgtccgggggaggggagggtgatttacgggggggtaggtcagggggtgggtcgtcaaactgccgctccttaaaaccccggggcccgtcgttcggggtgctcgttggttggcactcacggtgcggcgaatggcctgtcgtaagttttgtcgcgtttacgggggacagggcaggaggaaggaggaggccgtcccgccggagacaaagccgtcccgggtgtttcctcatggccccttttataccccagccgaggacgcgtgcctggactccccgcccccggagacccccaaaccttcccacaccacaccacccagcgaggccgagcgcctgtgtcatctgcaggagatccttgcccagatgtacggaaaccaggactaccccatagaggacgaccccagcgcggatgccgcggacgatgtcgacgaggacgccccggacgacgtggcctatccggaggaatacgcagaggagctttttctgcccggggacgcgaccggtccccttatcggggccaacgaccacatccctcccccgtgtggcgcatctccccccggtatacgacgacgcagccgggatgagattggggccacgggatttaccgcggaagagctggacgccatggacagggaggcggctcgagccatcagccgcggcggcaagcccccctcgaccatggccaagctggtgactggcatgggctttacgatccacggagcgctcaccccaggatcggaggggtgtgtctttgacagcagccatccagattacccccaacgggtaatcgtgaaggcggggtggtacacgagcacgagccacgaggcgcgactgctgaggcgactggaccacccggcgatcctgcccctcctggacctgcatgtcgtctccggggtcacgtgtctggtcctccccaagtaccaggccgacctgtatacctatctgagtaggcgcctgaacccactgggacgcccgcagatcgcagcggtctcccggcagctcctaagcgccgttgactacattcaccgccagggcattatccaccgcgacattaagaccgaaaatatttttattaacacccccgaggacatttgcctgggggactttggcgccgcgtgcttcgtgcagggttcccgatcaagccccttcccctacggaatcgccggaaccatcgacaccaacgcccccgaggtcctggccggggatccgtataccacgaccgtcgacatttggagcgccggtctggtgatcttcgagactgccgtccacaacgcgtccttgttctcggccccccgcggccccaaaaggggcccgtgcgacagtcagatcacccgcatcatccgacaggcccaggtccacgttgacgagttttccccgcatccagaatcgcgcctcacctcgcgctaccgctcccgcgcggccgggaacaatcgcccgccgtacacccgaccggcctggacccgctactacaagatggacatagacgtcgaatatctggtttgcaaagccctcaccttcgacggcgcgcttcgccccagcgccgcagagctgctttgtttgccgctgtttcaacagaaatgaccgccccctgggggcggtgctgtttgcgggttggcacaaaaagaccccgatccgcgtctgtggtgtttttggcatcatgtcgcagggcgccatgcgtgccgttgttcccattatcccattccttttggttcttgtcggtgtatcgggggttcccaccaacgtctcctccaccacccaaccccaactccagaccaccggtcgtccctcgcatgaagcccccaacatgacccagaccggcaccaccgactctcccaccgccatcagccttaccacgcccgaccacacaccccccatgccaagtattggactggaggaggaggaagaggaggagggggccggggacggcgaacatcttgaggggggagatgggacccgtgacaccctaccccagtccccgggcccagccttcccgttggctgaggacgtcgagaaggacaaacccaaccgtcccgtagtcccatcccccgatcccaacaactcccccgcgcgccccgagaccagtcgcccgaagacaccccccaccattatcgggccgctggcaactcgccccacgacccgactcacctcaaagggacgacccttggttccgacgcctcaacataccccgctgttctcgttcctcactgcctcccccgccctggacaccctcttcgtcgtcagcaccgtcatccacaccttatcgtttttgtgtattggtgcgatggcgacacacctgtgtggcggttggtccagacgcgggcgacgcacacaccctagcgtgcgttacgtgtgcctgccgtccgaacgcgggtagggtatggggcgggggatggggagagcccacatgcggaaagcaagaacaataaaggcggtggtatctagttgatatgcatctctgggtgtttttggggtgtggcggacgcggggcggtcattggacggggtgcagttaaatacatgcccgggacccatgaagcatgcgcgacttccgggcctcagaacccacccgaaacggccaacggacgtctgagccaggcctggctatccggagaaacagcacacgacttggcgttctgtgtgtcgcgatgtctctgcgcgcagtctggcatctggggcttttgggaagcctcgtgggggctgttcttgccgccacccatcggggacctgcggccaacacaacggaccccttaacgcacgccccagtgtcccctcaccccagccccctggggggctttgccgtccccctcgtagtcggtgggctgtgcgccgtagtcctgggggcggcatgtctgcttgagctcctgcgtcgtacgtgccgcgggtgggggcgttaccatccctacatggacccagttgtcgtataatttcccccccccccccccttctccgcgtgggtgatgtcgggtccaaactcccgacaccaccagctggcatggtataaatcaccggtgcgccccccaaaccatgtccggcagggggatgggggggcgaatgcggagggcacccaacaacaccgggctaaccaggaaatccgtggccccggcccccaataaagatcgcggtagcccggccgtgtgacactatcgtccataccgaccacaccgacgaatcccccaagggggaggggccattttacgaggaggaggggtataacaaagtctgtctttaaaaagcaggggttagggagttgttcggtcataagcttcagcgcgaacgaccaactaccccgatcatcagttatccttaaggtctcttttgtgtggtgcgttccggtatggggggggctgccgccaggttgggggccgtgattttgtttgtcgtcatagtgggcctccatggggtccgcggcaaatatgccttggtggatgcctctctcaagatggccgaccccaatcgctttcgcggcaaagaccttccggtcctggaccagctgaccgaccctccgggggtccggcgcgtgtaccacatccaggcgggcctaccggacccgttccagccccccagcctcccgatcacggtttactacgccgtgttggagcgcgcctgccgcagcgtgctcctaaacgcaccgtcggaggccccccagattgtccgcggggcctccgaagacgtccggaaacaaccctacaacctgaccatcgcttggtttcggatgggaggcaactgtgctatccccatcacggtcatggagtacaccgaatgctcctacaacaagtctctgggggcctgtcccatccgaacgcagccccgctggaactactatgacagcttcagcgccgtcagcgaggataacctggggttcctgatgcacgcccccgcgtttgagaccgccggcacgtacctgcggctcgtgaagataaacgactggacggagattacacagtttatcctggagcaccgagccaagggctcctgtaagtacgccctcccgctgcgcatccccccgtcagcctgcctctccccccaggcctaccagcagggggtgacggtggacagcatcgggatgctgccccgcttcatccccgagaaccagcgcaccgtcgccgtatacagcttgaagatcgccgggtggcacgggcccaaggccccatacacgagcaccctgctgcccccggagctgtccgagacccccaacgccacgcagccagaactcgccccggaagaccccgaggattcggccctcttggaggaccccgtggggacggtggcgccgcaaatcccaccaaactggcacataccgtcgatccaggacgccgcgacgccttaccatcccccggccaccccgaacaacatgggcctgatcgccggcgcggtgggcggcagtctcctggcagccctggtcatttgcggaattgtgtactggatgcgccgccacactcaaaaagccccaaagcgcatacgcctcccccacatccgggaagacgaccagccgtcctcgcaccagcccttgttttactagatacccccccttaatgggtgcgggggggtcaggtctgcggggttgggatgggaccttaactccatataaagcgagtctggaaggggggaaaggtggacagtcgataagtcggtagcgggggacgcgcacctgttccgcctgtcgcacccacagctttttttgcgaaccgtcccgttccgggatgccgtgccgcccgttgcagggcctggtgctcgtgggcctctgggtctgtgccaccagcctggttgtccgtggccccacggtcagtctggtatcaaactcatttgtggacgccggggccttggggcccgacggcgtagtggaggaagacctgcttattctcggggagcttcgctttgtgggggaccaggtcccccacaccacctactacgatgggggcgtagagctgtggcactaccccatgggacacaaatgcccacgggtcgtgcatgtcgtcacggtgaccgcgtgcccacgtcgccccgccgtggcattcgccctgtgtcgcgcgaccgacagcactcacagccccgcatatcccaccctggagctcaatctggcccaacagccgcttttgcgggtccagagggcaacgcgggactatgccggggtgtacgtgttacgcgtatgggtcggtgacgcgccaaacgccagcctgtttgtcctggggatggccatagccgccgaagggactctggcgtacaacggctcggcctatggctcctgcgacccgaaactgcttccgtcttcggccccgcgtctggccccggcgagcgtataccaacccgcccctaaccaggcctccaccccctcgaccaccacctccaccccctcgaccaccatccccgctccctcgaccaccatccccgctccccaagcatcgaccacgcccttccccacgggagatccaaaaccacaacctcccggggtcaaccacgaacccccatctaatgccacgcgagcgacccgcgactcgcgatacgcgctaacggtgacccagataatccagatagccatccccgcgtccatcatagccctggtgtttctggggagctgtatttgctttatacacagatgtcaacgccgctaccgacgctcccgtcgcccgatttacagcccccagatgcccacgggcatctcatgcgcggtgaacgaagcggccatggcccgcctcggagccgagctcaaatcgcatccgagcaccccccccaaatcccggcgccggtcgtcacgcacgccaatgccctccctgacggccatcgccgaagagtcggagcccgctggggcggctgggcttccgacgccccccgtggaccccacgacacccaccccaacgcctcccctgttggtataggtccacggccactggccgggagcaccacataaccgaccgcagtccctgagttgggaataaaccggtattatttacctatatccgtgtatgtcgatttctttccccccctccccggaaaccaaagaaggaagcaaagaatggatgggaggagttcaggaagccggggagagggcccgcggcgcatttaaggcgttgttgtgttgactttgcctcttctggcgggttggtgcggtgctgtttgttgggctcccattttacccgaagatcggctgctatccccgggacatggatcgcggggcggtggtggggtttcttctcggtgtttgtgttgtatcgtgcttggcgggaacgcccaaaacgtcctggagacgggtgagtgtcggcgaggacgtttcgttgcttccagctccggggcctacggggcgcggcccgacccagaaactactatgggccgtggaacccctggatgggtgcggccccttacacccgtcgtgggtctcgctgatgccccccaagcaggtgcccgagacggtcgtggatgcggcgtgcatgcgcgctccggtcccgctggcgatggcgtacgcccccccggccccatctgcgaccgggggtctacgaacggacttcgtgtggcaggagcgcgcggccgtggttaaccggagtctggttattcacggggtccgagagacggacagcggcctgtataccctgtccgtgggcgacataaaggacccggctcgccaagtggcctcggtggtcctggtggtgcaaccggccccagttccgaccccacccccgaccccagccgattacgacgaggatgacaatgacgagggcgaggacgaaagtctcgccggcactcccgccagcgggaccccccggctcccgcctccccccgcccccccgaggtcttggcccagcgcccccgaagtctcacatgtgcgtggggtgaccgtgcgtatggagactccggaagctatcctgttttcccccggggagacgttcagcacgaacgtctccatccatgccatcgcccacgacgaccagacctactccatggacgtcgtctggttgaggttcgacgtgccgacctcgtgtgccgagatgcgaatatacgaatcgtgtctgtatcacccgcagctcccagaatgtctgtccccggccgacgcgccgtgcgccgcgagtacgtggacgtctcgcctggccgtccgcagctacgcggggtgttccagaacaaaccccccaccgcgctgttcggccgaggctcacatggagcccgtcccggggctggcgtggcaggcggcctccgtcaatctggagttccgggacgcgtccccacaacactccggcctgtatctgtgtgtggtgtacgtcaacgaccatattcacgcctggggccacattaccatcagcaccgcggcgcagtaccggaacgcggtggtggaacagcccctcccacagcgcggcgcggatttggccgagcccacccacccgcacgtcggggcccctccccacgcgcccccaacccacggcgccctgcggttaggggcggtgatgggggccgccctgctgctgtctgcactggggttgtcggtgtgggcgtgtatgacctgttggcgcaggcgtgcctggcgggcggttaaaagcagggcctcgggtaaggggcccacgtacattcgcgtggccgacagcgagctgtacgcggactggagctcggacagcgagggagaacgcgaccaggtcccgtggctggcccccccggagagacccgactctccctccaccaatggatccggctttgagatcttatcaccaacggctccgtctgtatacccccgtagcgatgggcatcaatctcgccgccagctcacaacctttggatccggaaggcccgatcgccgttactcccaggcctccgattcgtccgtcttctggtaaggcgccccatcccgaggccccacgtcggtcgccgaactgggcgaccgccggcgaggtggacgtcggagacgagctaatcgcgatttccgacgaacgcggacccccccgacatgaccgcccgcccctcgccacgtcgaccgcgccctcgccacacccgcgacccccgggctacacggccgttgtctccccgatggccctccaggctgtcgacgccccctccctgtttgtcgcctggctggccgctcggtggctccggggggcttccggcctgggggccgtcctgtgtgggattgcgtggtatgtgacgtcaattgcccgaggcgcataaagggccggtggtccgcctagccgcagcaaattaaaaatcgtgagtcacagcgaccgcaacttcccacccggagctttcttccggcctcgatgacgtcccggctctccgatcccaactcctcagcgcgatccgacatgtccgtgccgctttatcccacggcctcgccagtttcggtcgaagcctactactcggaaagcgaagacgaggcggccaacgacttcctcgtacgcatgggccgccaacagtcggtattaaggcgtcgacgcagacgcacccgctgcgtcggcatggtgatcgcctgtctcctcgtggccgttctgtcgggcggatttggggcgctcctgatgtggctgctccgctaaaagaccgcatcgacacgcgcgtccttcttgtcgtctctcttcccccccatcaccccgcaatttgcacccagcctttaactacattaaattgggttcgattggcaatgttgtctcccggttgatttttgggtgggtggggagtgggtgggtggggagtgggtgggtggggagtgggtgggtggggagtgggtgggtggggagtgggtgggtggggagtgggtgggtggggagtgggtgggtggggagtgggtgggtggggagtgggtgggtggggagtggcaaggaagaaacaagcccgaccaccagacagaaaatgtaaccatacccaaaccgactctgggggctgtttgtggggtcggaaccataggatgaacaaaccaccccgtaccacccgcacccaagggtgcgggtggctcatcggcatctgtccggtatgggttgttccccacccactcgcgttcggacgtcttagaatcatggcggttttctatgccgacatcggttttctcccccgcaataagacacgatgcgataaaatctgtttgtaaaatttattaagggtacaaattgccctagcacaggggtggggttagggccgggtccccacacccaaacgcaccaaacagatgcaggcagtgggtcgagtacagccccgcgtacgaacacgtcgatgcgtgtgtcagacagcaccagaaagcacaggccatcaacaggtcgtgcatgtgtcggtgggtttggacgcggggggccatggtggtgataaagttaatggccgccgtccgccagggccacaggggcgacgtctcttggttggcccggagccactgggtgtggaccagccgcgcgtggcggcccaacatggcccctgtagccgggggcgggggatcgcgcacgtttgcagcgcacatgcgagacacctcgaccacggttcgaaagaaggcccggtggtccgcgggcaacatcaccaggtgcgcaagcgcccgggcgtccagagggtagagccctgagtcatccgaggttggctcatcgcccgggtcttgccgcaagtgcgtgtgggttgggcttccggtgggcgggacgcgaaccgcggtgtggatcccgacgcgggcccgagcgtatgctccatgttgtggggagaaggggtctgggctcgccaggggggcatacttgcccgggctatacagacccgcgagccgtacgtggttcgcggggggtgcgtggggtccggggctcccggggagaccggggctcccggggagaccggggctccctgggagaccggggttgtcgtggatccctggggtcacgcggtaccctggggtctctgggagctcgcggtactctgggttccctaggttctcggggtggtcgcggaacccggggctcccggggaacacgcggtgtcctggggattgttggcggtcggacggcttcagatggcttcgagatcgtagtgtccgcaccgactcgtagtagacccgaatctccacattgccccgccgcttgatcattatcaccccgttgcgggggtccggagatcatgcgcgggtgtcctcgaggtgcgtgaacacctctggggtgcatgccggcggacggcacgccttttaagtaaacatctgggtcgcccggcccaactggggccgggggttgggtctggctcatctcgagagccacgggggggaaccaccctccgcccagagactcgggtgatggtcgtacccgggacgctcccccccgacgagcaggaagcggtccacgcaacggtcgccgccggtcgcctcgacgaggacgttcctcctgcgggaaggcacgaacgcgggtgagccccctcctccgcccccgcgtcccccctcctccgcccccgcgtcccccctcctccgcccccgcgtcccccctcctccgcccccgcgtcccccctcctccgcccccgcgtccccccctcctccgcccacccaaggtgcttacccgtgcaaaaaaggcggaccggtgggtttctgtcgtcggaggcccccggggtgcgtcccctgtgtttcgtgggtggggtgggcgggtctttcccccccgcgtccgcgtgtccctttccgatgcgatcccgatcccgagccggggcgtcgcgatgccgacgccgtccgctccgacggccctctgcgactcccgctcccggtccgcgtgctccgcagccgctcccgtcgttcgtggccggcgccgtctgcgggcgtcggtcgcgccgggcctttatgtgcgccggagagacccgccccccgccgcccgggcccgcccccggggccggcgcggagtcgggcacggcgccagtgctcgcacttcgccctaataatatatatatattgggacgaagtgcgaacgcttcgcgttctcacttcttttacccggcggccccgcccccttggggcggtcccgcccgccggccaatgggggggcggcaaggcgggcggcccttgggccgcccgccgtcccgttggtcccggcgtccggcgggcgggaccggggggcccggggacggccaacgggcgcgcggggctcgtatctcattaccgccgaaccgggaagtcggggcccgggccccgccccctgcccgttcctcgttagcatgcggaacggaagcggaaaccgccggatcgggcggtaatgagatgccatgcggggcggggcgcggacccacccgccctcgcgccccgcccatggcagatggcgcggatgggcggggccgggggttcgaccaacgggccgcggccacgggcccccggcgtgccggcgtcggggcggggtcgtgcataatggaattccgttcggggtgggcccgccgggggggcggggggccggcggcctccgctgctcctccttcccgccggcccctgggactatatgagcccgaggacgccccgatcgtccacacggagcgcggctgccgacacggatccacgacccgacgcgggaccgccagagacagaccgtcagacgctcgccgcgccgggacgccgatacgcggacgaagcgcgggagggggatcggccgtccctgtcctttttcccacccaagcatcgaccggtccgcgctagttccgcgtcgacggcgggggtcgtcggggtccgtgggtctcgccccctccccccatcgagagtccgtaggtgacctaccgtgctacgtccgccgtcgcagccgtatccccggaggatcgccccgcatcggcgatggcgtcggagaacaagcagcgccccggctccccgggccccaccgacgggccgccgcccaccccgagcccagaccgcgacgagcggggggccctcgggtggggcgcggagacggaggagggcggggacgaccccgaccacgaccccgaccacccccacgacctcgacgacgcccggcgggacgggagggcccccgcggcgggcaccgacgccggcgaggacgccggggacgccgtctcgccgcgacagctggctctgctggcctccatggtagaggaggccgtccggacgatcccgacgcccgaccccgcggcctcgccgccccggacccccgcctttcgagccgacgacgatgacggggacgagtacgacgacgcagccgacgccgccggcgaccgggccccggcccggggccgcgaacgggaggccccgctacgcggcgcgtatccggaccccacggaccgcctgtcgccgcgcccgccggcccagccgccgcggagacgtcgtcacggccggtggcggccatcggcgtcatcgacctcgtcggactccgggtcctcgtcctcgtcgtccgcatcctcttcgtcctcgtcgtccgacgaggacgaggacgacgacggcaacgacgcggccgaccacgcacgcgaggcgcgggccgtcgggcggggtccgtcgagcgcggcgccggcagcccccgggcggacgccgcccccgcccgggccaccccccctctccgaggccgcgcccaagccccgggcggcggcgaggacccccgcggcctccgcgggccgcatcgagcgccgccgggcccgcgcggcggtggccggccgcgacgccacgggccgcttcacggccgggcagccccggcgggtcgagctggacgccgacgcggcctccggcgccttctacgcgcgctatcgcgacgggtacgtcagcggggagccgtggcccggcgccgggcccccgcccccggggcgggtgctgtacggcggcctgggcgacagccgcccgggcctctggggggcgcccgaggcggaggaggcgcgacgccggttcgaggcctcgggcgccccggcggccgtgtgggcgcccgagctgggcgacgccgcgcagcagtacgccctgatcacgcggctgctgtacaccccggacgcggaggccatggggtggctccagaacccgcgcgtggtccccggggacgtggcgctggaccaggcctgcttccggatctcgggcgccgcgcgcaacagcagctccttcatcaccggcagcgtggcgcgggccgtgccccacctgggctacgccatggcggccggccgcttcggctggggcctggcgcacgcggcggccgccgtggccatgagccgccgatacgaccgcgcgcagaagggcttcctgctgaccagcctgcgccgcgcctacgcgcccctgttggcgcgcgagaacgcggcgctgacgggggccgcggggagccccggcgccggcgcagatgacgagggggtcgccgccgtcgccgccgccgcaccgggcgagcgcgcggtgcccgccgggtacggcgccgcggggatcctcgccgccctggggcggctgtccgccgcgcccgcctcccccgcggggggcgacgaccccgacgccgcccgccacgccgacgccgacgacgacgccgggcgccgcgcccaggccggccgcgtggccgtcgagtgcctggccgcctgccgcgggatcctggaggcgctggccgagggcttcgacggcgacctggcggccgtcccggggctggccggggcccggcccgccagccccccgcggccggagggacccgcgggccccgcttccccgccgccgccgcacgccgacgcgccccgcctgcgcgcgtggctgcgcgagctgcggttcgtgcgcgacgcgctggtgctcatgcgcctgcgcggggacctgcgcgtggccggcggcagcgaggccgccgtggccgccgtgcgcgccgtgagcctggtcgccggggccctgggccccgcgctgccgcgggacccgcgcctgccgagctccgcggccgccgccgccgcggacctgctgtttgacaaccagagcctgcgccccctgctggcggcggcggccagcgcaccggacgccgccgacgcgctggcggccgccgccgcctccgccgcgccgcgggaggggcgcaagcgcaagagtcccggcccggcccggccgcccggaggcggcggcccgcgacccccgaagacgaagaagagcggcgcggacgcccccggctcggacgcccgcgcccccctccccgcgcccgcgcccccctccacgcccccggggcccgagcccgcccccgcccagcccgcggcgccccgggccgccgcggcgcaggcccgcccgcgccccgtggcgctgtcgcgccggcccgccgagggccccgaccccctgggcggctggcggcggcagcccccggggcccagccacacggcggcgcccgcggccgccgccctggaggcctactgctccccgcgcgccgtggccgagctcacggaccacccgctgttccccgtcccctggcgaccggccctcatgtttgacccgcgggccctggcctcgatcgccgcgcggtgcgccgggcccgcccccgccgcccaggccgcgtgcggcggcggcgacgacgacgataacccccacccccacggggccgccgggggccgcctctttggccccctgcgcgcctcgggcccgctgcgccgcatggcggcctggatgcgccagatccccgaccccgaggacgtgcgcgtggtggtgctgtactcgccgctgccgggcgaggacctggccggcggcggggcctcgggggggccgccggagtggtccgccgagcgcggcgggctgtcctgcctgctggcggccctggccaaccggctgtgcgggccggacacggccgcctgggcgggcaactggaccggcgcccccgacgtgtcggcgctgggcgcacagggcgtgctgctgctgtccacgcgggacctggccttcgccggggccgtggagtttctggggctgctcgccagcgccggcgaccggcggctcatcgtggtcaacaccgtgcgcgcctgcgactggcccgccgacgggcccgcggtgtcgcggcagcacgcctacctggcgtgcgagctgctgcccgccgtgcagtgcgccgtgcgctggccggcggcgcgggacctgcgccgcacggtgctggcctcgggccgcgtgttcggcccgggggtcttcgcgcgcgtggaggccgcgcacgcgcgcctgtaccccgacgcgccgccgctgcgcctgtgccgcggcggcaacgtgcgctaccgcgtgcgcacgcgcttcggcccggacacgccggtgcccatgtccccgcgcgagtaccgccgggccgtgctgccggcgctggacggccgggcggcggcctcggggaccaccgacgccatggcgcccggcgcgccggacttctgcgaggaggaggcccactcgcaccgcgcctgcgcgcgctggggcctgggcgcgccgctgcggcccgtgtacgtggcgctggggcgcgaggcggtgcgcgccggcccggcccggtggcgcgggccgcggagggacttttgcgcccgcgccctgctggagcccgacgacgacgcccccccgctggtgctgcgcggcgacgacgacggcccgggggccctgccgccggcgccgcccgggattcgctgggcctcggccacgggccgcagcggcaccgtgctggcggcggcgggggccgtggaggtgctgggggcggaggcgggcttggccacgcccccgcggcgggaagttgtggactgggaaggcgcctgggacgaagacgacggcggcgcgttcgagggggacggggtgctgtaacgggccgggacggggcggggcgcttgtgagacccgaagacgcaataaacggcaacaacctgattaagttttgcagtagcgttgtttattcgaggggcgggagggggcgaggggcgggagggggcgaggggcgggagggggcgaggggcgggagggggcgaggggcgggagggggcgaggggcgggagggggcgaggggcgggagggggcgaggggcgggagggggcgaggggcgggagggggcgaggggcgggagggggcgaggggcgggagggggcgaggggcgggagggggcgaggggcgggagggggcgaggggcgggagggggcgaggggcgggagggggcgaggggcgggagggggcgaggggcgggagggggcgaggggcgggagggggcgaggggcgggagggggcgaggggcggtggtggtgcgcgggcgcccccggagggtttggatctctgacctgagattggcggcactgaggtagagatgcccgaacccccccgagggagcgcgggacgcggccggggagggctggggccggggagggctggggccggggagggctggggccggggagggctggggccggggagggctggggccggggagggctggggccggggagggctggggccggggagggctggggctggggaggggcggtggtgtgtagcaggagcggtgtgttgcgccggggtacgtctggaggagcgggaggtgcgcggtgacgtgtggatgaggaacaggagttgttgcgcggtgagttgtcgctgtgagttgtgttgttgggcaggtgtggtggatgacgtgacgtgtgacgtgcggagtgcgccgtgctctgttggtttcacctgtggcagcccgggccccccgcgggcgcgcgcgcgcgcaaaaaaggcgggcggcggtccgggcggcgtgcgcgcgcgcggcgggcgtggggggcggggccgcgggagcggggggaggagcggggggaggagcggggggaggagcggggggaggagcggggggaggagcggggggaggagcggggggaggagcggggggaggagcggggggaggagcggggggaggagcggggggaggagcggggggaggagcggggggaggagcggggggaggagcggggggaggagcggggggaggagcggggggaggagcggggggaggagcggccagaccccgaaaacgggccccccccaaaacacaccccccgggggtcgcgcgcggccctttaaagcggcggcggcgggc

SEQ ID NO: 243 - protein, 6 aa, synthetic construct
HHHHHH

SEQ ID NO: 244 - protein, 10 aa, synthetic construct
YPYDVPDYAC

SEQ ID NO: 245 - protein, 6 aa, unidentified
SESPVT

SEQ ID NO: 246 - protein, 4 aa, synthetic construct
SESP

SEQ ID NO: 247 - protein, 4 aa, synthetic construct
PPTR

SEQ ID NO: 248 - protein, 6 aa, synthetic construct
GGGGGS

SEQ ID NO: 249 - protein, 15 aa, synthetic construct
GGGGSGGGGSGGGGS

1. A system comprising an oncolytic Herpes Simplex Virus (oHSV) expressing an albumin-PTEN fusion polynucleotide and an anti-PD1 antibody, analog, derivative or PD1 binding fragment thereof.

2. The system of claim 1, wherein the oHSV is oHSV1 or oHSV2.

3. The system of claim 1, wherein said anti-PD1 antibody is selected from pembrolizumab, nivolumab, sintilimab, tislelizumab, toripalimab, camrelizumab geptanolimab serplulimab zimberelimab cemiplimab, dostarlimab, prolgolimab, balstilimab, penpulimab, retifanlimab, cadonilimab, pucotenlimab, sasanlimab, or cetrelimab.

4. The system of claim 1, wherein the albumin-PTEN fusion polynucleotide comprises SEQ ID NO:226.

5. The system of claim 1, wherein the PTEN-albumin fusion polynucleotide comprises SEQ ID NO:226 and the anti-PD1 binding fragment comprises SEQ ID NO:222.

6. The system of claim 1, wherein the polynucleotide encoding the albumin-PTEN fusion comprises SEQ ID NO:226 and the antigen binding fragment of the anti-PD1 antibody comprises an scFv fragment of an anti-PD1 antibody selected from pembrolizumab, sintilimab, tislelizumab, toripalimab, camrelizumab geptanolimab serplulimab zimberelimab cemiplimab, dostarlimab, prolgolimab, balstilimab, penpulimab, retifanlimab, cadonilimab, pucotenlimab, sasanlimab, or cetrelimab.

7. The system of claim 1, wherein the oHSV comprises SEQ ID NO:241, or an equivalent thereof.

8. The system of claim 1, conjugated to a carrier, optionally a polymer, a dendrimer, an aptamer, a polymeric coating, a hydrogel, or a mesenchymal stem cell (MSC).

9. A composition expressed by the system of claim 1.

10. A method for inhibiting the growth of a cancer cell comprising contacting the cell or tissue comprising the cell with the system of claim 1.

11. The method of claim 10, wherein the cell expresses PD1 and/or expresses minimal or no PTEN.

12. The method of claim 10, wherein the cancer cell is a colorectal cancer cell.

13. The method of claim 10, wherein the system is contacted with the cell or tissue, and wherein the oHSV and the anti-PD1 antibody, analog, derivative or PD1 binding fragment thereof is contacted sequentially, separately or concurrently with the cell or tissue.

14. A method for inhibiting the growth of a cancer cell comprising contacting the cell or tissue comprising the cell with the system of claim 7.

15. A method treating a cancer in a subject in need thereof, comprising administering to the subject an effective amount of the system of claim 1, thereby treating the cancer.

16. A method treating a cancer in a subject in need thereof, comprising administering to the subject an effective amount of the system of claim 7, thereby treating the cancer.

17. The method of claim 15, wherein the oHSV and the anti-PD1 antibody, analog, derivative or anti-PD1 binding fragment are administered simultaneously, separately, or sequentially.

18. The method of claim 15, wherein the cancer expresses PD1 or wherein the cancer is selected from a blood cancer, a carcinoma, a sarcoma, a colorectal cancer, a breast cancer or a brain cancer.

19. The method of claim 15, further comprising determining if the cancer cell expresses PD1 and/or expresses minimal or no PTEN.

20. A composition expressed by the system of claim 7.
